(19) United States
(12) Patent Application Publication
(10) Pub. No.: US 2023/0295616 A1
(43) Pub. Date: Sep. 21, 2023

(54) CRISPR-CAS BASED SYSTEM FOR TARGETING SINGLE-STRANDED SEQUENCES

(71) Applicants: National Technology & Engineering Solutions of Sandia, LLC, Albuquerque, NM (US); The Regents of the University of California, Oakland, CA (US)

(72) Inventors: Oscar Negrete, Livermore, CA (US); Jennifer A. Doudna, Berkeley, CA (US); Steven C. Strutt, Berkeley, CA (US)

(21) Appl. No.: 18/127,853

(22) Filed: Mar. 29, 2023

Related U.S. Application Data
(62) Division of application No. 16/219,779, filed on Dec. 13, 2018, now Pat. No. 11,661,599.
(60) Provisional application No. 62/598,888, filed on Dec. 14, 2017.

(51) Int. Cl. C12N 15/11; C12N 9/22; C12Q 1/6888; A61K 31/7088; A61K 38/46

(52) U.S. Cl. CPC C12N 15/11; C12N 9/22; C12Q 1/6888; A61K 31/7088; A61K 38/465; C12N 2800/80; C12N 2310/20

(57) ABSTRACT

The present invention relates to a CRISPR-Cas based system for targeting nucleic acid sequences. In part, the invention relates to synthetic guiding components for targeting single-stranded sequences, as well as design principles for constructing such components. Also described herein are methods of employing such components, e.g., to repress or activate a desired target within the subject.

### CROSS-REFERENCE TO RELATED APPLICATION

[0001] This application is a divisional of U.S. application Ser. No. 16/219,779, filed on Dec. 13, 2018, which in turn claims the benefit of U.S. Provisional Application No. 62/598,888, filed Dec. 14, 2017, which is hereby incorporated by reference in its entirety.

### STATEMENT OF GOVERNMENT INTEREST

[0002] This invention was made with Government support under Contract No. DE-NA0003525 awarded by the United States Department of Energy/National Nuclear Security Administration and under Contract No. MCB-1244557 awarded by the National Science Foundation. The Government has certain rights in the invention.

### REFERENCE TO A SEQUENCE LISTING APPENDIX

[0003] A sequence listing appendix including an XML formatted file accompanies this application. The appendix includes a file named “SD-14537.xml,” created on Mar. 28, 2023 (size of 22.3 megabytes), which is hereby incorporated by reference in its entirety.

### FIELD OF THE INVENTION

[0004] The present invention relates to a CRISPR-Cas based system for targeting nucleic acid sequences. In part, the invention relates to synthetic guiding components for targeting single-stranded sequences and complexes including such components. Also described herein are methods of employing such components, e.g., to repress or activate a desired target within a subject.

### BACKGROUND OF THE INVENTION

[0005] CRISPR-Cas based systems have emerged as a promising methodology for gene editing. Many studies focus on the use of a particular endonuclease, Cas9, and its function as a DNA endonuclease that cleaves DNA. Targeting and editing of RNA remains relatively unexplored. Accordingly, there is a need for synthetic constructs and methods that provide specific targeting and modulation of RNA targets.

### SUMMARY OF THE INVENTION

[0006] The present invention relates, in part, to use of a CRISPR-Cas based system for programmable RNA binding and cleavage. In particular, we present evidence that Staphylococcus aureus (Sau) Cas9 is a dual DNA/RNA targeting nuclease, which can be employed in cells to regulate genes on both the transcriptional and translational level in parallel by accounting for target site PAM adjacency. In one non-limiting example, SauCas9 RNA-scission depends on a single-guide RNA (sgRNA) and does not need a PAMmer sequence, thereby simplifying outstanding issues in delivery. Due to its small size, SauCas9 can be efficiently delivered to cells by use of a vector including a nucleic acid sequence encoding SauCas9 (e.g., an adeno-associated virus (AAV) vector). Further, Cas9-sgRNA could be delivered as a ribonucleoprotein complex, further providing additional in vitro and in vivo delivery options. Finally, the RNA-targeting capability of SauCas9 offers the advantage of modulating targets that rely primarily on RNA molecules (e.g., repressing viruses whose lifecycles consist of solely RNA molecules, thereby inaccessible to DNA cleavage) and of providing orthogonal, non-DNA targets for gene modification (e.g., regulating site-specific epigenetic modifications of RNA or providing isoform-specific targeting of RNA transcripts).

[0007] Accordingly, in a first non-limiting aspect, the present invention features a synthetic guiding component including a structure having the formula (I): W-X-Y-L-Z or salt thereof (e.g., 5′- W-X-Y-L-Z-3′). In one embodiment, W is an optional third portion including a nucleic acid sequence of from about 1 to 20 nucleic acids; X is a targeting portion including a nucleic acid sequence configured to bind to a target site of a single-stranded target sequence; Y is a first portion including a nucleic acid sequence configured to interact with a nuclease configured to bind and/or cleave the single-stranded target sequence; L is a linker; and Z is a second portion including a nucleic acid sequence configured to interact with the nuclease and the first portion.

[0008] In some embodiments, Y includes a nucleic acid sequence having at least 80% sequence identity (e.g., 85%, 90%, 95%, 96%, 97%, 98%, 99%, or 100% sequence identity) to any one of SEQ ID NOs:150-155, 179-186, 213-225, 239-243, 251-253, 256, 257, 260, and 262-264, or a complement of any of these, or a fragment thereof (e.g., a fragment having of from about 10 to about 50 nucleotides, such as of from about 10 to 15, 10 to 20, 10 to 25, 10 to 30, 10 to 35, 10 to 40, 10 to 45, 12 to 15, 12 to 20, 12 to 25, 12 to 30, 12 to 35, 12 to 40, 12 to 45, 12 to 50, 15 to 20, 15 to 25, 15 to 30, 15 to 35, 15 to 40, 15 to 45, 15 to 50, 20 to 25, 20 to 30, 20 to 35, 20 to 40, 20 to 45, 20 to 50, 25 to 30, 25 to 35, 25 to 40, 25 to 45, or 25 to 50 nucleotides).

[0009] In some embodiments, Z includes a nucleic acid sequence having at least 80% sequence identity (e.g., 85%, 90%, 95%, 96%, 97%, 98%, 99%, or 100% sequence identity) to any one of SEQ ID NOs:162-178, 192-212, 232-238, 244-250, 254, 255, 258, 259, 261, and 270-273, or a complement of any of these, or a fragment thereof (e.g., a fragment having of from about 10 to about 100 nucleotides, such as of from about 10 to 30, 10 to 40, 10 to 50, 10 to 60, 10 to 70, 10 to 80, 10 to 90, 20 to 30, 20 to 40, 20 to 50, 20 to 60, 20 to 70, 20 to 80, 20 to 90, 20 to 100, 30 to 40, 30 to 50, 30 to 60, 30 to 70, 30 to 80, 30 to 90, 30 to 100, 40 to 50, 40 to 60, 40 to 70, 40 to 80, 40 to 90, 40 to 100, 50 to 60, 50 to 70, 50 to 80, 50 to 90, 50 to 100, 60 to 80, 60 to 90, 60 to 100, 70 to 80, 70 to 90, 70 to 100, 80 to 90, 80 to 100, or 90 to 100 nucleotides).

[0010] In some embodiments, L includes a bond or a nucleic acid sequence having at least 80% sequence identity (e.g., 85%, 90%, 95%, 96%, 97%, 98%, 99%, or 100% sequence identity) to any one of SEQ ID NOs:156-161, 187-191, 226-231, and 265-269, or a complement of any of these, or a fragment thereof (e.g., a fragment having of from about 1 to about 10 nucleotides, such as from about 1 to 4, 1 to 5, 1 to 6, 1 to 7, 1 to 8, 1 to 9, 2 to 4, 2 to 5, 2 to 6, 2 to 7, 2 to 8, 2 to 9, or 2 to 10 nucleotides).

[0011] In some embodiments, the synthetic guiding component includes a nucleic acid sequence having at least 80% sequence identity (e.g., 85%, 90%, 95%, 96%, 97%, 98%, 99%, or 100% sequence identity) to any one of SEQ ID NOs:274-293, or a complement of any of these, or a fragment thereof (e.g., a fragment having of from about 75 to 250 nucleotides, such as of from about 75 to 100, 75 to 150, 75 to 200, 80 to 100, 80 to 150, 80 to 200, 80 to 250, 90 to 100, 90 to 150, 90 to 200, 90 to 250, 100 to 150, 100 to 200, 100 to 250, 150 to 200, 150 to 250, or 200 to 250 nucleotides, in which the length can either include or exclude W and/or X).

[0012] In some embodiments, W and/or Y includes one or more modified nucleic acids (e.g., a modified nucleic acid configured to promote access of the Cas enzyme to the target site, such as a sugar modification and/or a backbone modification) or bulges (e.g., inclusion of one or more unpaired nucleotides upon binding of W to a portion of the target sequence or upon binding of Y to the target sequence).

[0013] In some embodiments, X is configured to bind to the target site of a single-stranded human RNA target sequence (e.g., a mRNA target sequence) or a single-stranded pathogen target sequence (e.g., a viral RNA sequence).

[0014] In some embodiments, X has a length of from about 10 to about 30 nucleotides (e.g., of from about 10 to 15, 10 to 16, 10 to 17, 10 to 18, 10 to 19, 10 to 20, 10 to 21, 10 to 22, 10 to 23, 10 to 24, 10 to 25, 10 to 26, 10 to 27, 10 to 28, 10 to 29, 11 to 15, 11 to 16, 11 to 17, 11 to 18, 11 to 19, 11 to 20, 11 to 21, 11 to 22, 11 to 23, 11 to 24, 11 to 25, 11 to 26, 11 to 27, 11 to 28, 11 to 29, 11 to 30, 12 to 15, 12 to 16, 12 to 17, 12 to 18, 12 to 19, 12 to 20, 12 to 21, 12 to 22, 12 to 23, 12 to 24, 12 to 25, 12 to 26, 12 to 27, 12 to 28, 12 to 29, 12 to 30, 13 to 15, 13 to 16, 13 to 17, 13 to 18, 13 to 19, 13 to 20, 13 to 21, 13 to 22, 13 to 23, 13 to 24, 13 to 25, 13 to 26, 13 to 27, 13 to 28, 13 to 29, 13 to 30, 14 to 15, 14 to 16, 14 to 17, 14 to 18, 14 to 19, 14 to 20, 14 to 21, 14 to 22, 14 to 23, 14 to 24, 14 to 25, 14 to 26, 14 to 27, 14 to 28, 14 to 29, 14 to 30, 15 to 16, 15 to 17, 15 to 18, 15 to 19, 15 to 20, 15 to 21, 15 to 22, 15 to 23, 15 to 24, 15 to 25, 15 to 26, 15 to 27, 15 to 28, 15 to 29, 15 to 30, 16 to 17, 16 to 18, 16 to 19, 16 to 20, 16 to 21, 16 to 22, 16 to 23, 16 to 24, 16 to 25, 16 to 26, 16 to 27, 16 to 28, 16 to 29, 16 to 30, 17 to 18, 17 to 19, 17 to 20, 17 to 21, 17 to 22, 17 to 23, 17 to 24, 17 to 25, 17 to 26, 17 to 27, 17 to 28, 17 to 29, 17 to 30, 18 to 19, 18 to 20, 18 to 21, 18 to 22, 18 to 23, 18 to 24, 18 to 25, 18 to 26, 18 to 27, 18 to 28, 18 to 29, 18 to 30, 19 to 20, 19 to 21, 19 to 22, 19 to 23, 19 to 24, 19 to 25, 19 to 26, 19 to 27, 19 to 28, 19 to 29, 19 to 30, 20 to 21, 20 to 22, 20 to 23, 20 to 24, 20 to 25, 20 to 26, 20 to 27, 20 to 28, 20 to 29, 20 to 30, 21 to 22, 21 to 23, 21 to 24, 21 to 25, 21 to 26, 21 to 27, 21 to 28, 21 to 29, 21 to 30, 22 to 23, 22 to 24, 22 to 25, 22 to 26, 22 to 27, 22 to 28, 22 to 29, 22 to 30, 23 to 24, 23 to 25, 23 to 26, 23 to 27, 23 to 28, 23 to 29, 23 to 30, 24 to 25, 24 to 26, 24 to 27, 24 to 28, 24 to 29, 24 to 30, 25 to 26, 25 to 27, 25 to 28, 25 to 29, 25 to 30, 26 to 27, 26 to 28, 26 to 29, 26 to 30, 27 to 28, 27 to 29, 27 to 30, 28 to 29, 28 to 30, or 29 to 30 nucleotides).

[0015] In some embodiments, Y includes a nucleic acid sequence having at least 80% sequence identity to any one of SEQ ID NOs:150-155, or a complement of any of these, or a fragment thereof; L is a bond or includes a nucleic acid sequence having at least 80% sequence identity to any one of SEQ ID NOs:156-161, or a complement of any of these, or a fragment thereof; and/or Z includes a nucleic acid sequence having at least 80% sequence identity to any one of SEQ ID NOs:162-178, or a complement of any of these, or a fragment thereof. In further embodiments, the nuclease includes an amino acid sequence having at least 80% sequence identity to any one of wild-type Staphylococcus aureus Cas9 (e.g., SauCas, e.g., SEQ ID NO:100 or 110), dSauCas9 (e.g., D10A and N580A, SEQ ID NO:101), or a fragment thereof.

[0016] In some embodiments, Y includes a nucleic acid sequence having at least 80% sequence identity to any one of SEQ ID NOs:179-186, or a complement of any of these, or a fragment thereof; L is a bond or includes a nucleic acid sequence having at least 80% sequence identity to any one of

[0017] SEQ ID NOs:187-191, or a complement of any of these, or a fragment thereof; and Z includes a nucleic acid sequence having at least 80% sequence identity to any one of SEQ ID NOs:192-212, or a complement of any of these, or a fragment thereof. In further embodiments, the nuclease includes an amino acid sequence having at least 80% sequence identity to any one of Campylobacter jejuni Cas9 (CjeCas9, e.g., SEQ ID NO:104), Campylobacter jejuni subsp. jejuni serotype O:2 Cas9 (e.g., SEQ ID NO:111), or a fragment thereof.

[0018] In some embodiments, Y includes a nucleic acid sequence having at least 80% sequence identity to any one of SEQ ID NOs: 213-225, or a complement of any of these, or a fragment thereof; L is a bond or includes a nucleic acid sequence having at least 80% sequence identity to any one of SEQ ID NOs:226-231, or a complement of any of these, or a fragment thereof; and Z includes a nucleic acid sequence having at least 80% sequence identity to any one of SEQ ID NOs:232-238, or a complement of any of these, or a fragment thereof. In further embodiments, the nuclease includes an amino acid sequence having at least 80% sequence identity to any one of Streptococcus thermophilus Cas9 (e.g., SEQ ID NO:112), Streptococcus thermophilus (strain ATCC BAA-491/LMD-9) Cas9-1 (e.g., SEQ ID NO:113), Streptococcus thermophilus (strain ATCC BAA-491/LMD-9) Cas9-2 (e.g., SEQ ID NO:114), or a fragment thereof.

[0019] In some embodiments, Y includes a nucleic acid sequence having at least 80% sequence identity to any one of SEQ ID NOs:239-243, or a complement of any of these, or a fragment thereof; and Z includes a nucleic acid sequence having at least 80% sequence identity to any one of SEQ ID NOs:244-250, or a complement of any of these, or a fragment thereof. In further embodiments, the nuclease includes an amino acid sequence having at least 80% sequence identity to any one of Wolinella succinogenes Cas9 (e.g., SEQ ID NO:115), Wolinella succinogenes Cas9/Csx12 (e.g., SEQ ID NO:116), or a fragment thereof.

[0020] In some embodiments, Y includes a nucleic acid sequence having at least 80% sequence identity to any one of SEQ ID NOs:251-253, or a complement of any of these, or a fragment thereof; and Z includes a nucleic acid sequence having at least 80% sequence identity to any one of SEQ ID NOs:254-255, or a complement of any of these, or a fragment thereof. In further embodiments, the nuclease includes an amino acid sequence having at least 80% sequence identity to Staphylococcus lugdunensis Cas9 (e.g., SEQ ID NO:117) or a fragment thereof.

[0021] In some embodiments, Y includes a nucleic acid sequence having at least 80% sequence identity to any one of SEQ ID NOs:256-257, or a complement of any of these, or a fragment thereof; and Z includes a nucleic acid sequence having at least 80% sequence identity to any one of SEQ ID NOs:258-259, or a complement of any of these, or a fragment thereof. In further embodiments, the nuclease includes an amino acid sequence having at least 80% sequence identity to Staphylococcus pseudintermedius Cas9 (e.g., Staphylococcus pseudintermedius ED99 Cas 9 or SEQ ID NO:118) or a fragment thereof.

[0022] In some embodiments, Y includes a nucleic acid sequence having at least 80% sequence identity to SEQ ID NO:260, or a complement of any of these, or a fragment thereof; and Z includes a nucleic acid sequence having at least 80% sequence identity to SEQ ID NO:261, or a complement of any of these, or a fragment thereof. In further embodiments, the nuclease includes an amino acid sequence having at least 80% sequence identity to Helicobacter mustelae Cas9 (e.g., SEQ ID NO:119) or a fragment thereof.

[0023] In some embodiments, Y includes a nucleic acid sequence having at least 80% sequence identity to any one of SEQ ID NOs:262-264, or a complement of any of these, or a fragment thereof; L is a bond or includes a nucleic acid sequence having at least 80% sequence identity to any one of SEQ ID NOs:265-269, or a complement of any of these, or a fragment thereof; and Z includes a nucleic acid sequence having at least 80% sequence identity to any one of SEQ ID NOs:270-273, or a complement of any of these, or a fragment thereof. In further embodiments, the nuclease includes an amino acid sequence having at least 80% sequence identity to any one of Streptococcus pasteurianus Cas9 (e.g., SEQ ID NO:120), Streptococcus pasteurianus (strain ATCC 43144/JCM 5346/CDC 1723-81) Cas9 (e.g., SEQ ID NO:121, or a fragment thereof.

[0024] In a second non-limiting aspect, the invention features a nucleoprotein complex including: a synthetic guiding component (e.g., any described herein); and a nuclease configured to bind and/or cleave a single-stranded target sequence.

[0025] In some embodiments, the nuclease is a Cas protein or a modified form thereof. In other embodiments, the nuclease includes an amino acid sequence having at least 80% sequence identity (e.g., 85%, 90%, 95%, 96%, 97%, 98%, 99%, or 100% sequence identity) to any one of SEQ ID NOs:100, 101, 104, and 110-121, or a fragment thereof (e.g., as described herein).

[0026] In other embodiments, the complex further includes one or more inorganic ions (e.g., monovalent and/or divalent ions) associated with the complex (e.g., any useful ion or combinations thereof, such as potassium (e.g., K⁺), magnesium (e.g., Mg²⁺), lithium (e.g., Li⁺), sodium (e.g., Na⁺), calcium (e.g., Ca²⁺), manganese (e.g., Mn²⁺), cadmium (e.g., Cd²⁺), lead (e.g., Pb²⁺), europium (e.g., Eu³⁺), and thallium (e.g., Tl⁺) ions, as well as combinations thereof).

[0027] In a third aspect, the invention features a method of modulating a single-stranded target sequence (e.g., an exogenous single-stranded target sequence) in a subject (e.g., any described herein). In some embodiments, the method includes: identifying an enriched single-stranded target sequence that is enriched in the subject when exposed to an exogenous pathogen (e.g., a virus, a bacterium, or any other described herein), as compared to the subject that is not exposed to the exogenous pathogen; designing a targeting portion of a synthetic guiding component (e.g., where the targeting portion is configured to bind to the enriched single-stranded target sequence, and/or where the synthetic guiding component is any described herein); and administering an effective amount of the synthetic guiding component, or a nucleic acid sequence encoding the synthetic guiding component, to the subject.

[0028] In some embodiments, the enriched single-stranded target sequence includes a portion of a genome for a pathogen (e.g., a virus), and the targeting portion of the synthetic guiding component is sufficiently complementary to the portion of the genome. In other embodiments, the enriched single-stranded target sequence has low structural complexity (e.g., characterized by a lack of secondary structure, such as a lack of base pairing, a lack of junctions, or a lack of stacking regions; or characterized by regions of accessible nucleic acids, such as loop regions or bulge regions having unpaired bases).

[0029] In a third non-limiting aspect, the invention features a method of modulating a target within a subject, the method including: identifying a single-stranded target sequence within the subject; designing a targeting portion of a synthetic guiding component (e.g., where the targeting portion is configured to bind to the single-stranded target sequence, and/or where the synthetic guiding component includes any structure described herein); and administering an effective amount of the synthetic guiding component, or a nucleic acid sequence encoding the synthetic guiding component, to the subject.

[0030] In a fourth non-limiting aspect, the invention features a method of modulating a target within a pathogen (e.g., a genome of the pathogen). In some embodiments, the method includes: identifying a single-stranded target sequence within the pathogen; designing a targeting portion of a synthetic guiding component (e.g., where the targeting portion is configured to bind to the single-stranded target sequence, and/or where the synthetic guiding component includes any structure described herein); and administering an effective amount of the synthetic guiding component, or a nucleic acid sequence encoding the synthetic guiding component, to the pathogen.

[0031] In any embodiment herein, the method includes identifying a single-stranded target sequence. In some embodiments, the identifying step includes determining a secondary structure of the single-stranded target sequence and choosing a target site in proximity to the secondary structure characterized by low structural complexity (e.g., characterized by a lack of secondary structure, such as a lack of base pairing interactions, a lack of junctions, or a lack of stacking regions; or characterized by regions of accessible nucleic acids, such as loop regions or bulge regions having unpaired bases).

[0032] In any embodiment herein, the method includes administering an effective amount of a nuclease, or a nucleic acid sequence encoding the nuclease. In particular embodiments, the nuclease is configured to interact with the synthetic guiding component and to bind and/or cleave the enriched single-stranded target sequence.

[0033] In any embodiment herein, the method includes modulating a target (e.g., increasing or decreasing the amount of a target, as compared to a control in which the synthetic guiding construct is not provided to the subject). Such modulating can include modulating RNA processing (e.g., modulating the activity of RNA polymerase), modulating viral replication (e.g., cleaving viral RNA), modulating gene expression by cleaving mRNA, interfering with protein binding to RNA, modulating splicing or RNA, modulating RNA transport, modulating localization of RNA, modulating translation of RNA, modulating turnover of mRNA, and modulating RNA folding.

[0034] In any embodiment herein, the single-stranded target sequence is a single-stranded RNA (e.g., a coding RNA or a non-coding RNA, such as any described herein).

[0035] In any embodiment herein, the effective amount of the synthetic guiding component is an amount sufficient to reduce expression of the target (e.g., in which the target is a gene product, such as a protein). In particular embodiments, the synthetic guiding component is configured to bind to the single-stranded target sequence that directly regulates the expression of the target (e.g., by cleaving the mRNA that encodes the target). In other embodiments, the synthetic guiding component is configured to bind to the single-stranded target sequence that indirectly regulates the expression of the target (e.g., by interfering with protein binding to RNA, which in turn interferes with expression of the target).

[0036] In any embodiment herein, the effective amount of the synthetic guiding component is an amount sufficient to increase expression of the target (e.g., in which the target is a gene product, such as a protein).

[0037] In any embodiment herein, the single-stranded target sequence is a single-stranded ribonucleic acid sequence (e.g., a portion of a sequence that is single-stranded or an entire sequence that is single-stranded). Exemplary single-stranded RNA sequences can include coding RNA or non-coding RNA, e.g., messenger RNA (mRNA, including elements thereof, such as a riboswitch, an untranslated region, a coding sequence, a start codon, a 5′ cap, or a poly-adenine tail), transfer-messenger RNA (tmRNA), ribosomal RNA (rRNA, such as the 30S, 40S, 50S, 60S, 80S, 5S, 5.8S, 12S, 16S, 18S, 23S, and 28S subunits), ribozyme, transfer RNA (tRNA), heterogeneous nuclear RNA (hnRNA), circular RNA, signal recognition particle RNA (SRP RNA, such as 4.5S, 6S, 7SL, or ffs RNA), X-inactive specific transcript (Xist), microRNA (miRNA), small interfering RNA (siRNA), piwi-interacting RNA (piRNA), small nucleolar RNA (snoRNA, such as small Cajal body-specific RNA (scaRNA)), small nuclear RNA (snRNA), extracellular RNA (exRNA), long non-coding RNA (lncRNA), large intergenic non-coding RNA (lincRNA), intergenic RNA, enhancer RNA (eRNA), satellite RNA (satRNA), and promoter-associated RNA (PAR).

[0038] In any embodiment herein, the nuclease is a Cas protein or a modified form thereof. In some embodiments, the nuclease includes an amino acid sequence having at least 80% sequence identity (e.g., 85%, 90%, 95%, 96%, 97%, 98%, 99%, or 100% sequence identity) to any one of SEQ ID NOs:100, 101, 104, and 110-121, or a fragment thereof (e.g., a fragment having of from about 500 to 1800 amino acids, such as of from about 500 to 1700, 500 to 1600, 500 to 1500, 500 to 1400, 500 to 1300, 500 to 1200, 500 to 1100, 500 to 1000, 500 to 950, 500 to 900, 600 to 1800, 600 to 1700, 600 to 1600, 600 to 1500, 600 to 1400, 600 to 1300, 600 to 1200, 600 to 1100, 600 to 1000, 600 to 950, 600 to 900, 700 to 1800, 700 to 1700, 700 to 1600, 700 to 1500, 700 to 1400, 700 to 1300, 700 to 1200, 700 to 1100, 700 to 1000, 700 to 950, 700 to 900, 800 to 1800, 800 to 1700, 800 to 1600, 800 to 1500, 800 to 1400, 800 to 1300, 800 to 1200, 800 to 1100, 800 to 1000, 800 to 950, 800 to 900, 900 to 1800, 900 to 1700, 900 to 1600, 900 to 1500, 900 to 1400, 900 to 1300, 900 to 1200, 900 to 1100, 900 to 1000, 900 to 950, 1000 to 1800, 1000 to 1700, 1000 to 1600, 1000 to 1500, 1000 to 1400, 1000 to 1300, 1000 to 1200, 1000 to 1100, 1100 to 1800, 1100 to 1700, 1100 to 1600, 1100 to 1500, 1100 to 1400, 1100 to 1300, 1100 to 1200, 1200 to 1800, 1200 to 1700, 1200 to 1600, 1200 to 1500, 1200 to 1400, 1200 to 1300, 1300 to 1800, 1300 to 1700, 1300 to 1600, 1300 to 1500, 1300 to 1400, 1400 to 1800, 1400 to 1700, 1400 to 1600, 1400 to 1500, 1500 to 1800, 1500 to 1700, 1500 to 1600, 1600 to 1800, 1600 to 1700, or 1700 to 1800 amino acids).

[0039] In any embodiment herein, the nuclease can be a fusion protein including a Cas9 domain and another domain (e.g., a polymerase (e.g., a RNA-dependent RNA polymerase), a riboswitch, a ribozyme, a transcriptional activator, a repressive transcriptional domain, or an epigenetic effector domain.

[0040] In any embodiment herein, the synthetic guiding component include a structure having the formula (I): W-X-Y-L-Z or salt thereof. In some embodiments, W has a length of from 0 to about 20 nucleotides (e.g., of from about 0 to 4, 0 to 5, 0 to 6, 0 to 7, 0 to 8, 0 to 9, 0 to 10, 0 to 15, 1 to 4, 1 to 5, 1 to 6, 1 to 7, 1 to 8, 1 to 9, 1 to 10, 1 to 15, 1 to 20, 2 to 4, 2 to 5, 2 to 6, 2 to 7, 2 to 8, 2 to 9, 2 to 10, 2 to 15, 2 to 20, 3 to 4, 3 to 5, 3 to 6, 3 to 7, 3 to 8, 3 to 9, 3 to 10, 3 to 15, 3 to 20, 4 to 5, 4 to 6, 4 to 7, 4 to 8, 4 to 9, 4 to 10, 4 to 15, 4 to 20, 5 to 6, 5 to 7, 5 to 8, 5 to 9, 5 to 10, 5 to 15, 5 to 20, 10 to 15, 10 to 20, or 15 to 20 nucleotides, and optionally including one or more modified nucleotides, such as any described herein); X has a length of from about 10 to about 35 nucleotides (e.g., of from about 10 to 11, 10 to 12, 10 to 13, 10 to 14, 10 to 15, 10 to 17, 10 to 20, 10 to 25, 10 to 30, 12 to 13, 12 to 14, 12 to 15, 12 to 17, 12 to 20, 12 to 25, 12 to 30, 13 to 14, 13 to 15, 13 to 17, 13 to 20, 13 to 25, 13 to 30, 13 to 35, 14 to 15, 14 to 17, 14 to 20, 14 to 25, 14 to 30, 14 to 35, 15 to 17, 15 to 20, 15 to 25, 15 to 30, 15 to 25, 17 to 20, 17 to 25, 17 to 30, 17 to 35, 18 to 20, 18 to 25, 18 to 30, 18 to 35, 19 to 20, 19 to 25, 19 to 30, 19 to 35, 20 to 21, 20 to 22, 20 to 23, 20 to 24, 20 to 25, 20 to 26, 20 to 27, 20 to 28, 20 to 29, 20 to 30, 20 to 31, 20 to 32, 20 to 33, 20 to 34, 20 to 35, 21 to 22, 21 to 23, 21 to 24, 21 to 25, 21 to 26, 21 to 27, 21 to 28, 21 to 29, 21 to 30, 21 to 31, 21 to 32, 21 to 33, 21 to 34, 21 to 35, 22 to 23, 22 to 24, 22 to 25, 22 to 26, 22 to 27, 22 to 28, 22 to 29, 22 to 30, 22 to 31, 22 to 32, 22 to 33, 22 to 34, 22 to 35, 23 to 24, 23 to 25, 23 to 26, 23 to 27, 23 to 28, 23 to 29, 23 to 30, 23 to 31, 23 to 32, 23 to 33, 23 to 34, 23 to 35, 24 to 25, 24 to 26, 24 to 27, 24 to 28, 24 to 29, 24 to 30, 24 to 31, 24 to 32, 24 to 33, 24 to 34, 24 to 35, 25 to 26, 25 to 27, 25 to 28, 25 to 29, 25 to 30, 25 to 31, 25 to 32, 25 to 33, 25 to 34, 25 to 35, 26 to 27, 26 to 28, 26 to 29, 26 to 30, 26 to 31, 26 to 32, 26 to 33, 26 to 34, 26 to 35, 27 to 28, 27 to 29, 27 to 30, 27 to 31, 27 to 32, 27 to 33, 27 to 34, 27 to 35, 28 to 29, 28 to 30, 28 to 31, 28 to 32, 28 to 33, 28 to 34, 28 to 35, 29 to 30, 29 to 31, 29 to 32, 29 to 33, 29 to 34, 29 to 35, 30 to 31, 30 to 32, 30 to 33, 30 to 34, 30 to 35, 31 to 32, 31 to 33, 31 to 34, 31 to 35, 32 to 33, 32 to 34, 32 to 35, 33 to 34, 33 to 35, or 34 to 35 nucleotides, and optionally including one or more base pair mismatches upon binding to the target site); Y has a length of from about 10 to about 50 nucleotides (e.g., of from about 10 to 20, 10 to 25, 10 to 30, 10 to 35, 10 to 40, 10 to 45, 15 to 20, 15 to 25, 15 to 30, 15 to 35, 15 to 40, 15 to 45, 15 to 50, 20 to 25, 20 to 30, 20 to 35, 20 to 40, 20 to 45, 20 to 50, 25 to 30, 25 to 35, 25 to 40, 25 to 45, 25 to 50, 30 to 35, 30 to 40, 30 to 45, 30 to 50, 35 to 40, 35 to 45, 35 to 50, 40 to 45, 40 to 50, or 45 to 50 nucleotides, and optionally including one or more modified nucleotides, such as any described herein); L has a length of from 0 to about 15 nucleotides (e.g., L is a bond, an C₁₋₁₀ alkylene, a C₁₋₁₀ heteroalkylene, or has a length of from about 0 to 10 nucleotides, such as 0 to 2, 0 to 4, 0 to 6, 0 to 8, 0 to 10, 0 to 15, 2 to 4, 2 to 6, 2 to 8, 2 to 10, 2 to 15, 4 to 6, 4 to 8, 4 to 10, 4 to 15, 6 to 8, 6 to 10, 6 to 15, 8 to 10, 8 to 15, 10 to 15, or 13 to 15 nucleotides); and/or Z has a length of from about 10 to about 100 nucleotides (e.g., of from about 10 to 20, 10 to 30, 10 to 40, 10 to 50, 10 to 60, 10 to 70, 10 to 80, 10 to 90, 20 to 30, 20 to 40, 20 to 50, 20 to 60, 20 to 70, 20 to 80, 20 to 90, 20 to 100, 30 to 40, 30 to 50, 30 to 60, 30 to 70, 30 to 80, 30 to 90, 30 to 100, 40 to 50, 40 to 60, 40 to 70, 40 to 80, 40 to 90, 40 to 100, 50 to 60, 50 to 70, 50 to 80, 50 to 90, 50 to 100, 60 to 70, 60 to 80, 60 to 90, 60 to 100, 70 to 80, 70 to 90, 70 to 100, 80 to 90, 80 to 100, or 90 to 100 nucleotides).

[0041] In any embodiment herein, the synthetic guiding construct has a length of from about 80 to about 300 nucleotides (e.g., of from about 80 to 90, 80 to 100, 80 to 125, 80 to 150, 80 to 175, 80 to 200, 80 to 225, 80 to 250, 80 to 275, 90 to 100, 90 to 125, 90 to 150, 90 to 175, 90 to 200, 90 to 225, 90 to 250, 90 to 275, 90 to 300, 100 to 125, 100 to 150, 100 to 175, 100 to 200, 100 to 225, 100 to 250, 100 to 275, 100 to 300, 125 to 150, 125 to 175, 125 to 200, 125 to 225, 125 to 250, 125 to 275, 125 to 300, 150 to 175, 150 to 200, 150 to 225, 150 to 250, 150 to 275, 150 to 300, 175 to 200, 175 to 225, 175 to 250, 175 to 275, 175 to 300, 200 to 225, 200 to 250, 200 to 275, 200 to 300, 250 to 275, 250 to 300, or 275 to 300 nucleotides).

[0042] In any embodiment herein, the synthetic guiding construct does not include a protospacer-adjacent motif sequence.

[0043] In any embodiment herein, the synthetic guiding construct and/or the nuclease can be provided as a vector (e.g., as a vector including a sequence that encodes the synthetic guiding construct and/or the nuclease).

### Definitions

[0044] As used herein, the term “about” means +/−10% of any recited value. As used herein, this term modifies any recited value, range of values, or endpoints of one or more ranges.

[0045] The term “effective” is used herein, unless otherwise indicated, to describe an amount of a compound, composition or component which, when used within the context of its use, produces or effects an intended result, whether that result relates to the prophylaxis and/or therapy of an infection and/or disease state or as otherwise described herein. The term effective subsumes all other effective amount or effective concentration terms (including the term “therapeutically effective”) which are otherwise described or used in the present application.

[0046] The term “compound” or “construct” is used herein to describe any specific compound or bioactive agent disclosed herein, including any and all stereoisomers (including diastereomers), individual optical isomers (enantiomers) or racemic mixtures, pharmaceutically acceptable salts (including alternative pharmaceutically acceptable salts when a pharmaceutically acceptable salt is disclosed) and prodrug forms. The term compound herein refers to stable compounds. Within its use in context, the term compound may refer to a single compound or a mixture of compounds as otherwise described herein.

[0047] By “salt” is meant an ionic form of a compound or structure (e.g., any formulas, compounds, constructs, or compositions described herein), which includes a cation or anion compound to form an electrically neutral compound or structure. Salts are well known in the art. For example, non-toxic salts are described in Berge S M et al., “Pharmaceutical salts,” J. Pharm. Sci. 1977 January; 66(1):1-19; and in “Handbook of Pharmaceutical Salts: Properties, Selection, and Use,” Wiley-VCH, April 2011 (2nd rev. ed., eds. P. H. Stahl and C. G. Wermuth. The salts can be prepared in situ during the final isolation and purification of the compounds of the invention or separately by reacting the free base group with a suitable organic acid (thereby producing an anionic salt) or by reacting the acid group with a suitable metal or organic salt (thereby producing a cationic salt). Representative anionic salts include acetate, adipate, alginate, ascorbate, aspartate, benzenesulfonate, benzoate, bicarbonate, bisulfate, bitartrate, borate, bromide, butyrate, camphorate, camphorsulfonate, chloride, citrate, cyclopentanepropionate, digluconate, dihydrochloride, diphosphate, dodecylsulfate, edetate, ethanesulfonate, fumarate, glucoheptonate, glucomate, glutamate, glycerophosphate, hemisulfate, heptonate, hexanoate, hydrobromide, hydrochloride, hydroiodide, hydroxyethanesulfonate, hydroxynaphthoate, iodide, lactate, lactobionate, laurate, lauryl sulfate, malate, maleate, malonate, mandelate, mesylate, methanesulfonate, methylbromide, methylnitrate, methylsulfate, mucate, 2-naphthalenesulfonate, nicotinate, nitrate, oleate, oxalate, palmitate, pamoate, pectinate, persulfate, 3-phenylpropionate, phosphate, picrate, pivalate, polygalacturonate, propionate, salicylate, stearate, subacetate, succinate, sulfate, tannate, tartrate, theophyllinate, thiocyanate, triethiodide, toluenesulfonate, undecanoate, valerate salts, and the like. Representative cationic salts include metal salts, such as alkali or alkaline earth salts, e.g., barium, calcium (e.g., calcium edetate), lithium, magnesium, potassium, sodium, and the like; other metal salts, such as aluminum, bismuth, iron, and zinc; as well as nontoxic ammonium, quaternary ammonium, and amine cations, including, but not limited to ammonium, tetramethylammonium, tetraethylammonium, methylamine, dimethylamine, trimethylamine, triethylamine, ethylamine, pyridinium, and the like. Other cationic salts include organic salts, such as chloroprocaine, choline, dibenzylethylenediamine, diethanolamine, ethylenediamine, methylglucamine, and procaine. Exemplary salts include pharmaceutically acceptable salts.

[0048] By “pharmaceutically acceptable salt” is meant a salt that is, within the scope of sound medical judgment, suitable for use in contact with the tissues of humans and animals without undue toxicity, irritation, allergic response and the like and are commensurate with a reasonable benefit/risk ratio.

[0049] By “pharmaceutically acceptable excipient” is meant any ingredient other than a compound or structure (e.g., any formulas, compounds, or compositions described herein) and having the properties of being nontoxic and non-inflammatory in a subject. Exemplary, non-limiting excipients include adjuvants, antiadherents, antioxidants, binders, carriers, coatings, compression aids, diluents, disintegrants, dispersing agents, dyes (colors), emollients, emulsifiers, fillers (diluents), film formers or coatings, flavors, fragrances, glidants (flow enhancers), isotonic carriers, lubricants, preservatives, printing inks, solvents, sorbents, stabilizers, suspensing or dispersing agents, surfactants, sweeteners, waters of hydration, or wetting agents. Any of the excipients can be selected from those approved, for example, by the United States Food and Drug Administration or other governmental agency as being acceptable for use in humans or domestic animals. Exemplary excipients include, but are not limited to alcohol, butylated hydroxytoluene (BHT), calcium carbonate, calcium phosphate (dibasic), calcium stearate, croscarmellose, cross-linked polyvinyl pyrrolidone, citric acid, crospovidone, cysteine, ethylcellulose, gelatin, glycerol, hydroxypropyl cellulose, hydroxypropyl methylcellulose, lactated Ringer's solution, lactose, magnesium stearate, maltitol, maltose, mannitol, methionine, methylcellulose, methyl paraben, microcrystalline cellulose, polyethylene glycol, polyol, polyvinyl pyrrolidone, povidone, pregelatinized starch, propyl paraben, retinyl palmitate, Ringer's solution, shellac, silicon dioxide, sodium carboxymethyl cellulose, sodium chloride injection, sodium citrate, sodium starch glycolate, sorbitol, starch (corn), stearic acid, stearic acid, sucrose, talc, titanium dioxide, vegetable oil, vitamin A, vitamin E, vitamin C, water, and xylitol.

[0050] By “isomer” is meant a molecule having the same molecular formula as the reference molecule. Exemplary isomers include stereoisomers, diastereomers, enantiomers, geometric isomers, tautomers, as well as mixtures thereof.

[0051] By an “effective amount” or a “sufficient amount” of an agent, as used herein, is that amount sufficient to effect beneficial or desired results, such as clinical results, and, as such, an “effective amount” depends upon the context in which it is being applied. For example, in the context of administering an agent that is a repressor of a gene, an effective amount of an agent is, for example, an amount sufficient to achieve a reduction in that gene's expression, as compared to the response obtained without administration of the agent.

[0052] By “subject” is meant a human, a non-human animal (e.g., a mammal), a host (e.g., a subject exposed to a pathogen, such as a human host exposed to a pathogen), a plant, a bacterium, or a pathogen (e.g., a virus, a phage, a bacterium, or a fungus).

[0053] By “treating” a disease, disorder, or condition in a subject is meant reducing at least one symptom of the disease, disorder, or condition by administrating a therapeutic agent to the subject. By “treating prophylactically” a disease, disorder, or condition in a subject is meant reducing the frequency of occurrence of or reducing the severity of a disease, disorder or condition by administering a therapeutic agent to the subject prior to the onset of disease symptoms. Beneficial or desired results can include, but are not limited to, alleviation or amelioration of one or more symptoms or conditions; diminishment of extent of disease, disorder, or condition; stabilized (i.e., not worsening) state of disease, disorder, or condition; preventing spread of disease, disorder, or condition; delay or slowing the progress of the disease, disorder, or condition; amelioration or palliation of the disease, disorder, or condition; and remission (whether partial or total), whether detectable or undetectable.

[0054] In accordance with the present invention there may be employed conventional molecular biology, microbiology, and recombinant DNA techniques within the skill of the art. Such techniques are explained fully in the literature. See, e.g., Sambrook et al., 2001, “Molecular Cloning: A Laboratory Manual”; Ausubel, ed., 1994, “Current Protocols in Molecular Biology” Volumes I-III; Celis, ed., 1994, “Cell Biology: A Laboratory Handbook” Volumes I-III; Coligan, ed., 1994, “Current Protocols in Immunology” Volumes I-III; Gait ed., 1984, “Oligonucleotide Synthesis”; Hames & Higgins eds., 1985, “Nucleic Acid Hybridization”; Hames & Higgins, eds., 1984, “Transcription And Translation”; Freshney, ed., 1986, “Animal Cell Culture”; IRL.

[0055] The terms “polynucleotide” and “nucleic acid,” used interchangeably herein, refer to a polymeric form of nucleotides of any length, either ribonucleotides or deoxyribonucleotides. Thus, this term includes, but is not limited to, single-stranded (e.g., sense or antisense), double-stranded, or multi-stranded ribonucleic acids (RNAs), deoxyribonucleic acids (DNAs), threose nucleic acids (TNAs), glycol nucleic acids (GNAs), peptide nucleic acids (PNAs), locked nucleic acids (LNAs), hybrids thereof, genomic DNA, cDNA, DNA-RNA hybrids, or a polymer comprising purine and pyrimidine bases or other natural, chemically or biochemically modified, non-natural, or derivatized nucleotide bases. Polynucleotides can have any useful two-dimensional or three-dimensional structure or motif, such as regions including one or more duplex, triplex, quadruplex, hairpin, and/or pseudoknot structures or motifs. Any sequence with uracil may be substituted with thymine and vice versa.

[0056] The term “modified,” as used in reference to nucleic acids, means a nucleic acid sequence including one or more modifications to the nucleobase, nucleoside, nucleotide, phosphate group, sugar group, and/or internucleoside linkage (e.g., phosphodiester backbone, linking phosphate, or a phosphodiester linkage).

[0057] The nucleoside modification may include, but is not limited to, pyridin-4-one ribonucleoside, 5-aza-uridine, 2-thio-5-aza-uridine, 2-thiouridine, 4-thio-pseudouridine, 2-thio-pseudouridine, 5-hydroxyuridine, 3-methyluridine, 5-carboxymethyl-uridine, 1-carboxymethyl-pseudouridine, 5-propynyl-uridine, 1-propynyl-pseudouridine, 5-taurinomethyluridine, 1-taurinomethyl-pseudouridine, 5-taurinomethyl-2-thio-uridine, 1-taurinomethyl-4-thio-uridine, 5-methyl-uridine, 1-methyl-pseudouridine, 4-thio-1-methyl-pseudouridine, 2-thio-1-methyl-pseudouridine, 1-methyl-1-deaza-pseudouridine, 2-thio-1-methyl-1-deaza-pseudouridine, dihydrouridine, dihydropseudouridine, 2-thio-dihydrouridine, 2-thio-dihydropseudouridine, 2-methoxyuridine, 2-methoxy-4-thio-uridine, 4-methoxy-pseudouridine, 4-methoxy-2-thio-pseudouridine, 5-aza-cytidine, pseudoisocytidine, 3-methyl-cytidine, N4-acetylcytidine, 5-formylcytidine, N4-methylcytidine, 5-hydroxymethylcytidine, 1-methyl-pseudoisocytidine, pyrrolo-cytidine, pyrrolo-pseudoisocytidine, 2-thio-cytidine, 2-thio-5-methyl-cytidine, 4-thio-pseudoisocytidine, 4-thio-1-methyl-pseudoisocytidine, 4-thio-1-methyl-1-deaza-pseudoisocytidine, 1-methyl-1-deaza-pseudoisocytidine, zebularine, 5-aza-zebularine, 5-methyl-zebularine, 5-aza-2-thio-zebularine, 2-thio-zebularine, 2-methoxy-cytidine, 2-methoxy-5-methyl-cytidine, 4-methoxy-pseudoisocytidine, 4-methoxy-1-methyl-pseudoisocytidine, 2-aminopurine, 2,6-diaminopurine, 7-deaza-adenine, 7-deaza-8-aza-adenine, 7-deaza-2-aminopurine, 7-deaza-8-aza-2-aminopurine, 7-deaza-2,6-diaminopurine, 7-deaza-8-aza-2,6-diaminopurine, 1-methyladenosine, N6-methyladenosine, N6-isopentenyladenosine, N6-(cis-hydroxyisopentenyl)adenosine, 2-methylthio-N6-(cis-hydroxyisopentenyl) adenosine, N6-glycinylcarbamoyladenosine, N6-threonylcarbamoyladenosine, 2-methylthio-N6-threonyl carbamoyladenosine, N6,N6-dimethyladenosine, 7-methyladenine, 2-methylthio-adenine, and 2-methoxy-adenine, inosine, 1-methyl-inosine, wyosine, wybutosine, 7-deaza-guanosine, 7-deaza-8-aza-guanosine, 6-thio-guanosine, 6-thio-7-deaza-guanosine, 6-thio-7-deaza-8-aza-guanosine, 7-methyl-guanosine, 6-thio-7-methyl-guanosine, 7-methylinosine, 6-methoxy-guanosine, 1-methylguanosine, N2-methylguanosine, N2,N2-dimethylguanosine, 8-oxo-guanosine, 7-methyl-8-oxo-guanosine, 1-methyl-6-thio-guanosine, N2-methyl-6-thio-guanosine, and N2,N2-dimethyl-6-thio-guanosine, and combinations thereof.

[0058] A sugar modification may include, but is not limited to, a locked nucleic acid (LNA, in which the 2′-hydroxyl is connected by a C_{1,6} alkylene (e.g., a multivalent (e.g., bivalent, trivalent, tetravalent, etc.) form of an alkyl group) or C₁₋₆ heteroalkylene (e.g., a divalent form of an alkylene group containing one, two, three, or four non carbon heteroatoms (e.g., independently selected from the group consisting of nitrogen, oxygen, phosphorous, sulfur, or halo) bridge to the 4′-carbon of the same ribose sugar), replacement of the oxygen in ribose (e.g., with S, Se, or alkylene, such as methylene or ethylene), addition of a double bond (e.g., to replace ribose with cyclopentenyl or cyclohexenyl), ring contraction of ribose (e.g., to form a 4-membered ring of cyclobutane or oxetane), ring expansion of ribose (e.g., to form a 6- or 7-membered ring having an additional carbon or heteroatom, such as for anhydrohexitol, altritol, mannitol, cyclohexanyl, cyclohexenyl, and morpholino that also has a phosphoramidate backbone), multicyclic forms (e.g., tricyclic), and “unlocked” forms, such as glycol nucleic acid (GNA) (e.g., R-GNA or S-GNA, where ribose is replaced by glycol units attached to phosphodiester bonds), threose nucleic acid (TNA, where ribose is replace with a-L-threofuranosyl-(3′→2′)), and peptide nucleic acid (PNA, where 2-amino-ethyl-glycine linkages replace the ribose and phosphodiester backbone). The sugar group can also contain one or more carbons that possess the opposite stereochemical configuration than that of the corresponding carbon in ribose. Thus, a polynucleotide molecule can include nucleotides containing, e.g., arabinose, as the sugar.

[0059] A backbone modification may include, but is not limited to, 2′-deoxy- or 2′-O-methyl modifications. Exemplary modifications include modifications to the 2′ position of a nucleic acid, such as 2′-O-methyl, 2′-halo (e.g., 2′-fluoro, 2′-chloro, etc.), 2′-alkyl (e.g., 2′-methyl, 2′-ethyl, 2′-propyl, 2′-allyl, etc.), 2′-aryl (e.g., 2′-phenyl), 2′-alkaryl (e.g., 2′-benzyl), 2′-amino (e.g., 2′-NH₂, 2′-NR^{N1}R^{N2}, which each of R^{N1} and R^{N2} is, independently, H, alkyl, or alkaryl), 2′-alkoxy (e.g. 2′-O-methoxy, 2′-O-ethoxy, etc.), 2′-alkylamine (e.g., 2′-O-methylamine, 2′-O-ethylamine, etc.), 2′-O-alkylamine (e.g., 2′-O-methylamine, 2′-O-ethylamine, etc.), 2′-azido, 2′-O-cyanoalkyl (e.g., 2′-O-cyanomethyl), 2′-O-alkoxylalkyl (e.g., 2′-O-(2-methoxyethyl)), etc.

[0060] A phosphate group modification may include, but is not limited to, phosphorothioate, phosphoroselenates, boranophosphates, boranophosphate esters, hydrogen phosphonates, phosphoramidates, phosphorodiamidates, alkyl or aryl phosphonates, phosphotriesters, phosphorodithioates, bridged phosphoramidates, bridged phosphorothioates, or bridged methylene-phosphonates.

[0061] “Complementarity” or “complementary” refers to the ability of a nucleic acid to form hydrogen bond(s) with another nucleic acid sequence by either traditional Watson-Crick or other non-traditional types, e.g., form Watson-Crick base pairs and/or G/U base pairs, “anneal”, or “hybridize,” to another nucleic acid in a sequence-specific, antiparallel, manner (i.e., a nucleic acid specifically binds to a complementary nucleic acid) under the appropriate in vitro and/or in vivo conditions of temperature and solution ionic strength. As is known in the art, standard Watson-Crick base-pairing includes: adenine (A) pairing with thymidine (T), adenine (A) pairing with uracil (U), and guanine (G) pairing with cytosine (C). In addition, it is also known in the art that for hybridization between two RNA molecules (e.g., dsRNA), guanine (G) base pairs with uracil (U). A percent complementarity indicates the percentage of residues in a nucleic acid molecule which can form hydrogen bonds (e.g., Watson-Crick base pairing) with a second nucleic acid sequence (e.g., 5, 6, 7, 8, 9, 10 out of 10 being 50%, 60%, 70%, 80%, 90%, and 100% complementary). “Perfectly complementary” means that all the contiguous residues of a nucleic acid sequence will hydrogen bond with the same number of contiguous residues in a second nucleic acid sequence. “Substantially complementary” or “sufficient complementarity” as used herein refers to a degree of complementarity that is at least 60%, 65%, 70%, 75%, 80%, 85%, 90%, 95%. 97%, 98%, 99%, or 100% over a region of 8, 9, 10, 11, 12, 13, 14, 15, 16, 17, 18, 19, 20, 21, 22, 23, 24, 25, 30, 35, 40, 45, 50, or more nucleotides, or refers to two nucleic acids that hybridize under stringent conditions.

[0062] As used herein, “stringent conditions” for hybridization refer to conditions under which a nucleic acid having complementarity to a target sequence predominantly hybridizes with the target sequence, and substantially does not hybridize to non-target sequences. Stringent conditions are generally sequence-dependent, and vary depending on a number of factors. In general, the longer the sequence, the higher the temperature at which the sequence specifically hybridizes to its target sequence. Non-limiting examples of stringent conditions are described in detail in Tijssen (1993), Laboratory Techniques In Biochemistry And Molecular Biology-Hybridization With Nucleic Acid Probes Part 1, Second Chapter “Overview of principles of hybridization and the strategy of nucleic acid probe assay”, Elsevier, N.Y.

[0063] “Hybridization” refers to a reaction in which one or more polynucleotides react to form a complex that is stabilized via hydrogen bonding between the bases of the nucleotide residues. The hydrogen bonding may occur by Watson Crick base pairing, Hoogstein binding, or in any other sequence specific manner. The complex may comprise two strands forming a duplex structure, three or more strands forming a multi stranded complex, a single self-hybridizing strand, or any combination of these. A hybridization reaction may constitute a step in a more extensive process, such as the initiation of PCR, or the cleavage of a polynucleotide by an enzyme. A sequence capable of hybridizing with a given sequence is referred to as the “complement” of the given sequence. Hybridization and washing conditions are well known and exemplified in Sambrook J, Fritsch E F, and Maniatis T, “Molecular Cloning: A Laboratory Manual,” Second Edition, Cold Spring Harbor Laboratory Press, Cold Spring Harbor (1989), particularly Chapter 11 and Table 11.1 therein; and Sambrook J and Russell W, “Molecular Cloning: A Laboratory Manual,” Third Edition, Cold Spring Harbor Laboratory Press, Cold Spring Harbor (2001). The conditions of temperature and ionic strength determine the “stringency” of the hybridization.

[0064] Hybridization requires that the two nucleic acids contain complementary sequences, although mismatches between bases are possible. The conditions appropriate for hybridization between two nucleic acids depend on the length of the nucleic acids and the degree of complementation, variables well known in the art. The greater the degree of complementation between two nucleotide sequences, the greater the value of the melting temperature (Tm) for hybrids of nucleic acids having those sequences. For hybridizations between nucleic acids with short stretches of complementarity (e.g., complementarity over 35 or less, 30 or less, 25 or less, 22 or less, 20 or less, or 18 or less nucleotides) the position of mismatches becomes important (see Sambrook et al., supra, 11.7-11.8). Typically, the length for a hybridizable nucleic acid is at least about 10 nucleotides. Illustrative minimum lengths for a hybridizable nucleic acid are: at least about 15 nucleotides; at least about 20 nucleotides; at least about 22 nucleotides; at least about 25 nucleotides; and at least about 30 nucleotides). Furthermore, the skilled artisan will recognize that the temperature and wash solution salt concentration may be adjusted as necessary according to factors such as length of the region of complementation and the degree of complementation.

[0065] It is understood in the art that the sequence of polynucleotide need not be 100% complementary to that of its target nucleic acid to be specifically hybridizable or hybridizable. Moreover, a polynucleotide may hybridize over one or more segments such that intervening or adjacent segments are not involved in the hybridization event (e.g., a loop structure or hairpin structure). A polynucleotide can comprise at least 70%, at least 80%, at least 90%, at least 95%, at least 99%, or 100% sequence complementarity to a target region within the target nucleic acid sequence to which they are targeted. For example, an antisense nucleic acid in which 18 of 20 nucleotides of the antisense compound are complementary to a target region, and would therefore specifically hybridize, would represent 90 percent complementarity. In this example, the remaining noncomplementary nucleotides may be clustered or interspersed with complementary nucleotides and need not be contiguous to each other or to complementary nucleotides. Percent complementarity between particular stretches of nucleic acid sequences within nucleic acids can be determined routinely using BLAST programs (basic local alignment search tools) and PowerBLAST programs known in the art (Altschul S F et al., J. Mol. Biol. 1990; 215:403-10; Zhang J et al., Genome Res. 1997; 7:649-56) or by using the Gap program (Wisconsin Sequence Analysis Package, Version 8 for Unix, Genetics Computer Group, University Research Park, Madison Wis.), using default settings, which uses the algorithm of Smith T F et al., Adv. Appl. Math. 1981; 2(4):482-9).

[0066] By “protein,” “peptide,” or “polypeptide,” as used interchangeably, is meant any chain of more than two amino acids, regardless of post-translational modification (e.g., glycosylation or phosphorylation), constituting all or part of a naturally occurring polypeptide or peptide, or constituting a non-naturally occurring polypeptide or peptide, which can include coded amino acids, non-coded amino acids, modified amino acids (e.g., chemically and/or biologically modified amino acids), and/or modified backbones.

[0067] The term “fragment” is meant a portion of a nucleic acid or a polypeptide that is at least one nucleotide or one amino acid shorter than the reference sequence. This portion contains, preferably, at least about 10%, 20%, 30%, 40%, 50%, 60%, 70%, 80%, or 90% of the entire length of the reference nucleic acid molecule or polypeptide. A fragment may contain 10, 20, 30, 40, 50, 60, 70, 80, 90, or 100, 200, 300, 400, 500, 600, 700, 800, 900, 1000, 1250, 1500, 1750, 1800, or more nucleotides; or 10, 20, 30, 40, 50, 60, 70, 80, 90, 100, 150, 200, 250, 300, 350, 400, 450, 500, 550, 600, 640, or more amino acids. In another example, any polypeptide fragment can include a stretch of at least about 5 (e.g., about 10, about 20, about 30, about 40, about 50, or about 100) amino acids that are at least about 40% (e.g., about 50%, about 60%, about 70%, about 80%, about 90%, about 95%, about 87%, about 98%, about 99%, or about 100%) identical to any of the sequences described herein can be utilized in accordance with the invention. In certain embodiments, a polypeptide to be utilized in accordance with the invention includes 2, 3, 4, 5, 6, 7, 8, 9, 10, or more mutations (e.g., one or more conservative amino acid substitutions, as described herein). In yet another example, any nucleic acid fragment can include a stretch of at least about 5 (e.g., about 7, about 8, about 10, about 12, about 14, about 18, about 20, about 24, about 28, about 30, or more) nucleotides that are at least about 40% (about 50%, about 60%, about 70%, about 80%, about 90%, about 95%, about 87%, about 98%, about 99%, or about 100%) identical to any of the sequences described herein can be utilized in accordance with the invention.

[0068] The term “conservative amino acid substitution” refers to the interchangeability in proteins of amino acid residues having similar side chains (e.g., of similar size, charge, and/or polarity). For example, a group of amino acids having aliphatic side chains consists of glycine, alanine, valine, leucine, and isoleucine; a group of amino acids having aliphatic-hydroxyl side chains consists of serine and threonine; a group of amino acids having amide containing side chains consisting of asparagine and glutamine; a group of amino acids having aromatic side chains consists of phenylalanine, tyrosine, and tryptophan; a group of amino acids having basic side chains consists of lysine, arginine, and histidine; a group of amino acids having acidic side chains consists of glutamic acid and aspartic acid; and a group of amino acids having sulfur containing side chains consists of cysteine and methionine. Exemplary conservative amino acid substitution groups are valine-leucine-isoleucine, phenylalanine-tyrosine, lysine-arginine, alanine-valine, glycine-serine, glutamate-aspartate, and asparagine-glutamine.

[0069] As used herein, when a polypeptide or nucleic acid sequence is referred to as having “at least X % sequence identity” to a reference sequence, it is meant that at least X percent of the amino acids or nucleotides in the polypeptide or nucleic acid are identical to those of the reference sequence when the sequences are optimally aligned. An optimal alignment of sequences can be determined in various ways that are within the skill in the art, for instance, the Smith Waterman alignment algorithm (Smith T F et al., J. Mol. Biol. 1981; 147:195-7) and BLAST (Basic Local Alignment Search Tool; Altschul S F et al., J. Mol. Biol. 1990; 215:403-10). These and other alignment algorithms are accessible using publicly available computer software such as “Best Fit” (Smith T F et al., Adv. Appl. Math. 1981; 2(4):482-9) as incorporated into GeneMatcher Plus™ (Schwarz and Dayhof, “Atlas of Protein Sequence and Structure,” ed. Dayhoff, M. O., pp. 353-358, 1979), BLAST, BLAST-2, BLAST-P, BLAST-N, BLAST-X, WU-BLAST-2, ALIGN, ALIGN-2, CLUSTAL, T-COFFEE, MUSCLE, MAFFT, or Megalign (DNASTAR). In addition, those skilled in the art can determine appropriate parameters for measuring alignment, including any algorithms needed to achieve optimal alignment over the length of the sequences being compared. In general, for polypeptides, the length of comparison sequences can be at least five amino acids, preferably 10, 20, 30, 40, 50, 60, 70, 80, 90, 100, 125, 150, 175, 200, 250, 300, 400, 500, 600, 700, or more amino acids, up to the entire length of the polypeptide. For nucleic acids, the length of comparison sequences can generally be at least 10, 20, 30, 40, 50, 60, 70, 80, 90, 100, 125, 150, 175, 200, 250, 300, 400, 500, 600, 700, 800, 900, 1000, 1100, 1200, 1300, 1400, 1500, 1600, 1700, 1800, 1900, 2000, 2100, or more nucleotides, up to the entire length of the nucleic acid molecule. It is understood that for the purposes of determining sequence identity when comparing a DNA sequence to an RNA sequence, a thymine nucleotide is equivalent to a uracil nucleotide.

[0070] By “substantial identity” or “substantially identical” is meant a polypeptide or nucleic acid sequence that has the same polypeptide or nucleic acid sequence, respectively, as a reference sequence, or has a specified percentage of amino acid residues or nucleotides, respectively, that are the same at the corresponding location within a reference sequence when the two sequences are optimally aligned. For example, an amino acid sequence that is “substantially identical” to a reference sequence has at least about 50%, 60%, 70%, 75%, 80%, 85%, 90%, 95%, 96%, 97%, 98%, 99%, or 100% sequence identity to the reference amino acid sequence. For polypeptides, the length of comparison sequences will generally be at least 5, 6, 7, 8, 9, 10, 11, 12, 13, 14, 15, 16, 17, 18, 19, 20, 25, 50, 75, 90, 100, 150, 200, 250, 300, or 350 contiguous amino acids (e.g., a full-length sequence). For nucleic acids, the length of comparison sequences will generally be at least 5, 10, 11, 12, 13, 14, 15, 16, 17, 18, 19, 20, 21, 22, 23, 24, or 25 contiguous nucleotides (e.g., the full-length nucleotide sequence). Sequence identity may be measured using sequence analysis software on the default setting (e.g., Sequence Analysis Software Package of the Genetics Computer Group, University of Wisconsin Biotechnology Center, 1710 University Avenue, Madison, WI, 53705). Such software may match similar sequences by assigning degrees of homology to various substitutions, deletions, and other modifications.

[0071] A “target sequence” as used herein is a polynucleotide (e.g., as defined herein, including a DNA, RNA, or DNA/RNA hybrid, as well as modified forms thereof and single-stranded forms thereof) that includes a “target site.” The term “target site” refers to a nucleic acid sequence present in a target genomic sequence (e.g., ssDNA or ssRNA in a host or pathogen) to which a targeting portion of the guiding component will bind provided sufficient conditions (e.g., sufficient complementarity) for binding exist. Suitable DNA/RNA binding conditions include physiological conditions normally present in a cell. Other suitable DNA/RNA binding conditions (e.g., conditions in a cell-free system) are known in the art; see, e.g., Sambrook, supra.

[0072] By “cleavage” it is meant the breakage of the covalent backbone of a target sequence (e.g., a nucleic acid molecule). Cleavage can be initiated by a variety of methods including, but not limited to, enzymatic or chemical hydrolysis of a phosphodiester bond. Both single-stranded cleavage and double-stranded cleavage are possible, and double-stranded cleavage can occur as a result of two distinct single-stranded cleavage events. DNA cleavage can result in the production of either blunt ends or staggered ends. In certain embodiments, a complex comprising a guiding component and a nuclease is used for targeted double-stranded DNA cleavage. In other embodiments, a complex comprising a guiding component and a nuclease is used for targeted single-stranded RNA cleavage.

[0073] “Nuclease” and “endonuclease” are used interchangeably herein to mean an enzyme which possesses catalytic activity for cleavage of a nucleic acid sequence.

[0074] By “cleavage domain” or “active domain” or “nuclease domain” of a nuclease it is meant the polypeptide sequence or domain within the nuclease which possesses the catalytic activity for nucleic acid cleavage. A cleavage domain can be contained in a single polypeptide chain or cleavage activity can result from the association of two (or more) polypeptides. A single nuclease domain may consist of more than one isolated stretch of amino acids within a given polypeptide.

[0075] By “linker” is meant any useful multivalent (e.g., bivalent) component useful for joining to different portions or segments. Exemplary linkers include a bond (e.g., a covalent bond), a nucleic acid sequence, a chemical linker, etc. In one instance, the linker of the synthetic guiding component can have a length of from about 3 nucleotides to about 100 nucleotides. For example, the linker can have a length of from about 3 nucleotides (nt) to about 90 nt, from about 3 nucleotides (nt) to about 80 nt, from about 3 nucleotides (nt) to about 70 nt, from about 3 nucleotides (nt) to about 60 nt, from about 3 nucleotides (nt) to about 50 nt, from about 3 nucleotides (nt) to about 40 nt, from about 3 nucleotides (nt) to about 30 nt, from about 3 nucleotides (nt) to about 20 nt or from about 3 nucleotides (nt) to about 10 nt. For example, the linker can have a length of from about 3 nt to about 5 nt, from about 5 nt to about 10 nt, from about 10 nt to about 15 nt, from about 15 nt to about 20 nt, from about 20 nt to about 25 nt, from about 25 nt to about 30 nt, from about 30 nt to about 35 nt, from about 35 nt to about 40 nt, from about 40 nt to about 50 nt, from about 50 nt to about 60 nt, from about 60 nt to about 70 nt, from about 70 nt to about 80 nt, from about 80 nt to about 90 nt, or from about 90 nt to about 100 nt. In some embodiments, the linker of a synthetic guiding component is 4 nt.

[0076] A “vector” or “expression vector” is a replicon, such as plasmid, phage, virus, or cosmid, to which another nucleic acid segment, i.e., an “insert”, may be attached so as to bring about the replication of the attached segment in a cell.

[0077] As used herein, the terms “top,” “bottom,” “upper,” “lower,” “above,” and “below” are used to provide a relative relationship between structures. The use of these terms does not indicate or require that a particular structure must be located at a particular location in the apparatus.

[0078] Other features and advantages of the invention will be apparent from the following description and the claims.

### BRIEF DESCRIPTION OF THE DRAWINGS

[0079] FIGS. 1A-1B show exemplary CRISPR-CAS based systems for targeting a target sequence. Provided are a schematic of an exemplary complex including a synthetic guiding component 90 and a nuclease 98, in which the complex in turn is bound to the target site 97 of the target sequence 96 (FIG. 1A); and a schematic of another exemplary complex including a synthetic guiding component and a Cas enzyme, in which the complex in turn is bound to a single-stranded (ss) target sequence (FIG. 1B).

[0080] FIGS. 2A-2C show exemplary synthetic guiding components. Provided are a schematic of non-limiting interactions between the targeting portion 204 of the synthetic guiding component 200 with the target site 211 of the target sequence 21, as well as interactions between the first portion 201 and second portion 202 of the component 200 (FIG. 2A); a schematic of a non-limiting synthetic guiding component 300 having a targeting portion 304, a first portion 301, a second portion 302, an optional third portion 303, and a linker 305 disposed between the first and second portions (FIG. 2B); and a schematic of a non-limiting synthetic guiding component 350 having a targeting portion 354, a first portion 351, a second portion 352 having a hairpin, an optional third portion 353, and a linker 355 disposed between the first and second portions (FIG. 2C).

[0081] FIGS. 3A-3D show that Staphylococcus aureus Cas9 (SauCas9) cleaves single-stranded RNA (ssRNA) without a short DNA oligo containing the PAM sequence (PAMmer). Schematic of Cas9 proteins tested for single-guide RNA (sgRNA) mediated RNA cleavage, which shows the following: RuvC nuclease domain (RuvC), bridge-helix (BH), recognition domain (REC), HNH nuclease domain (HNH), phosphate-lock loop (PLL), wedge domain (WED), and PAM-interacting domain (PI) (FIG. 3A). Adapted from Nishimasu H et al., Cell 2015; 162(5):1113-26; Nishimasu H et al., Cell 2014; 156(5):935-49; Hirano H et al., Cell 2016; 164(5):950-61; and Yamada M et al., Mol. Cell. 2017; 65(6):1109-21. Representative in vitro cleavage of ssRNA (FIG. 3B) by Cas9-sgRNA ribonucleoprotein (RNP) complexes of homologs in FIG. 3A. Radiolabeled pUC target RNA was incubated with Cas9 RNP at 37° C. and time points were taken at 0, 10, 30, and 60 min. Full time course is presented in FIG. 4B. T1 indicates size markers generated by RNase T1 digestion of ssRNA target. Size in nucleotides is indicated on the left. In vitro cleavage assay of various RNA substrates (FIG. 3C). Full time course is presented in FIG. 6A, 6D. Schematic of the Cas9-sgRNA RNP complex and various RNA substrates (FIG. 3D).

[0082] FIGS. 4A-4D show that RNA is cleaved by SauCas9 and CjeCas9. Phylogenetic tree of Cas9 homologs assayed for ssRNA cleavage activity (FIG. 4A). Tree was generated using homologs gathered from Chylinski K et al., Nucleic Acids Res. 2014; 42(10):6091-105. Only homologs tested for activity are highlighted as leaves on the tree, and clades are colored by Cas9 sub-type. Representative in vitro cleavage gel (FIG. 4B) for ssRNA targeting by various Cas9 homologs in FIG. 4A. Target used for cleavage was the pUC ssRNA. Time points are 0, 1, 2, 5, 10, 30, 60, and 120 mins. T1 RNase digest size fragments are given on the left. Quantification of fraction (FIG. 4C) cleaved in FIG. 4B. Fit was determined in Prism using a single-exponential decay model. Error bars represent the mean±S.D. (n=3). Apparent pseudo-first order fit parameters (FIG. 4D) of the data in FIG. 4C, where “% cleaved” indicates the fraction of substrate cleaved when the reaction plateaus (mean±S.D.).

[0083] FIGS. 5A-5E show that ssRNA cleavage is similar to canonical dsDNA cleavage by Cas9. In vitro SauCas9 cleavage assay of ssRNA (FIG. 5A). Reactions were incubated with wild-type SauCas9 (Wt SauCas9) or catalytically-inactive SauCas9 (dSauCas9; D10A and N580A) in the presence or absence of sgRNA as indicated above the reactions. EDTA was included at 25 mM where applicable. Under tested conditions, SauCas9 ssRNA cleavage was single-turnover (FIG. 5B). SauCas9 RNP was incubated with the RNA target in the various ratios indicated. Time points are 0, 1, 2, 5, 10, 30, 60, and 120 mins in FIGS. 5A-5B. T1 RNase digest size fragments are given on the left. Target used for cleavage was the pUC ssRNA. Graphical representation of ssRNA fraction cleaved (FIG. 5C) of reactions in FIG. 5B. Fit was determined in Prism using a single-exponential decay model. Error bars represent the mean±S.D. (n=3). Mapping of SauCas9 ssRNA cleavage site (FIG. 5D). Reaction products from a 2-hr incubation of SauCas9 RNP with the pUC ssRNA target were separated on a 15% denaturing PAGE gel with a hydrolysis and T1 digest ladder to determine exact site of the major cleavage product. Diagram of canonical DNA cleavage position and ssRNA cleavage position (FIG. 5E) as determined in FIG. 5D for the target (SEQ ID NO:12) in reference to the exemplary sgRNA (SEQ ID NO:303).

[0084] FIGS. 6A-6D show SauCas9 cleavage of different nucleic acid substrates. Representative cleavage assay of nucleic acid substrates (FIG. 6A, 6D) diagramed in FIG. 6B by SauCas9. Asterisk denotes an off-target cleavage site. Time points are 0, 1, 2, 5, 10, 30, 60, and 120 mins. T1 RNase digest size fragments are given on the left. Quantification (FIG. 6C) of results in FIG. 6A, 6D. Fit was determined in Prism using a single-exponential decay model. Error bars represent the mean±S.D. (n=3). Apparent pseudo-first order rate constant (k_{cleave}±S.D.) is given to the right of the substrate legend. “N.D.” indicates that an accurate rate cannot be determined due to the reaction reaching completion before the second time point; and “n.s.” indicates not significant.

[0085] FIGS. 7A-7D show that SauCas9 prefers a complementary region of 23 nt for binding and cleavage. Diagram of pUC ssRNA target (SEQ ID NO:12) and regions of complementary for the different length sgRNAs (SEQ ID NOs:300-306) (FIG. 7A). Representative in vitro cleavage assays using sgRNAs with a complementary region to the target of the indicated lengths (FIG. 7B). Time points are 0, 1, 2, 5, 10, 30, 60, and 120 mins. T1 RNase digest size fragments are given on the left. Quantification of cleavage products (FIG. 7C) from reactions in FIG. 7B. Length of targeting region of the sgRNA given as n-mer. Fit was determined in Prism using a single-exponential decay model. Error bars represent the mean±S.D. (n=3). Filter binding data for dSauCas9 and the structured RNA substrates were fit in Prism using a one-site binding model (FIG. 7D) and the apparent dissociation constant (K_{d,app}) was determined. Bars represent the mean±S.D. (n=3).

[0086] FIGS. 8A-8D show that in vitro RNA cleavage is impaired by strong secondary structure. Schematic representation of structured RNA targets (substrates 1 to 12) for in vitro cleavage assays (FIG. 8A). Symbols on right indicate relative level of cleavage activity for each substrate: no cleavage (−); low level of cleavage (+); medium level of cleavage (++); and high level of cleavage (+++). Representative cleavage assay (FIG. 8B) of partially-duplexed RNA targets diagrammed in FIG. 8A. T1 indicates size markers generated by RNase T1 digestion of ssRNA target. Size in nucleotides is indicated on the left. Fraction of target cleaved (FIG. 8C) and K_{d,app} (FIG. 8D) for substrates diagrammed in FIG. 8A. Fits were determined in Prism using a single-exponential decay and a one-site binding model, respectively. Bars represent mean±S.D. (n=3); and “n.s.” denotes no significant cleavage or binding.

[0087] FIGS. 9A-9E show that RNA cleavage can be limited by the RNA target. Predicted secondary structure of target RNA used in this study (SEQ ID NO:307) (FIG. 9A). In vitro cleavage assay of ssRNA with SauCas9 was conducted for 2 hr (time points: 0, 1, 2, 5, 10, 30, 60, 120 mins) (FIG. 9B). The reaction was split, and SauCas9-sgRNA RNP or apo SauCas9 were added. The reaction was further incubated at 37° C., and data at additional time points were taken to check for additional cleavage of the target. Time points were taken at 0, 1, 2, 5, 10, 30, 60, and 120 mins post-RNP/apo SauCas9 addition. Fit (FIG. 9C) for data in FIG. 9B was determined in Prism using a single-exponential decay model. Error bars represent the mean±S.D. (n=3). In vitro cleavage assay of two ssRNA targets added sequentially (FIG. 9D). After 60 min incubation of SauCas9 with the pUC target, another target containing either the same recognition sequence (ON target—Reaction 1) or an unrelated sequence (OFF target—Reaction 2) were added to the reaction. Cleavage was assayed for an additional 60 mins (time points: 0, 10, 30, 60 min). Reactions containing only the second target (Reactions 3 and 4) were conducted with SauCas9 RNP that was incubated for 60 min at 37° C. prior to addition to the cleavage reaction. Quantification (FIG. 9E) of cleavage of second target in FIG. 9D for time points after addition. Fit was determined in Prism using a single-exponential decay model. Error bars represent the mean±S.D. (n=3).

[0088] FIGS. 10A-10F show that SauCas9 confers in vivo protection against an RNA phage. Overview of MS2 targeting screen (FIG. 10A). Guides tiled against the library were cloned into sgRNA expression plasmids and co-transformed into E. coli with a plasmid containing wild-type SauCas9 under inducible control. Plasmids from surviving colonies after MS2 selection were recovered and sequenced. For more detail, see Example 2 herein. Number of guides with significant positive enrichment from three biological experiments (FIG. 10B), in which guides included those that were control (Control), perfect complementarity matches (Perfect), or guides with a single-nucleotide (SNP) mismatch. Box and whiskers plot of average log₂ fold-change of perfect MS2 guides by length (FIG. 10C). Whiskers represent 5% and 95% values with outliers graphed as points. *p<0.05, **p<0.01, ****p<0.0001, by one-way ANOVA. Log₂ fold-change plot of guides with an FDR-corrected p-value<0.05 mapped to the MS2 genome for multiplicities of infection (MOI) of 100 (MOI-100) treatment, in which a schematic of MS2 genome is provided above the plot (FIG. 10D, upper). Individual guides mapped to highlighted regions of MS2 genome (FIG. 10D, lower). Other graphs for MOI-10 and MOI-100 treatments are presented FIGS. 11A-11D. Representative plaque assay of SauCas9 in vivo protection (FIG. 10E). E. coli containing constructs on the right are spotted with various phage dilutions as indicated. Scr signifies that the targeting portion of the guide has been scrambled to serve as a non-targeting control. Relative plaque forming units (PFU) (mean±S.D., n=3) (FIG. 10F) from results in FIG. 10E. More guides and controls are presented in FIGS. 13A-13E.

[0089] FIGS. 11A-11D show that enriched guides do not display sequence bias and cluster to regions on the MS2 genome. Stacked bar graph of positively enriched guides (FDR-adjusted p-value<0.05) for perfectly complementary and single-nucleotide mismatch (SNP) guides for a multiplicities of infection (MOI) of 10 and 100 (FIG. 11A, left). Percentages of perfect and SNP guides by length averaged across the control libraries (n=3) (FIG. 11A, right). WebLogo (see, e.g., Crooks G E et al., Genome Res. 2004; 14(6):1188-90) representation of positively enriched guides (perfect complementarity, FDR-adjusted p-value<0.05) for MOI-10 (n=84) and MOI-100 (n=107) (FIG. 11B). Different length guides were aligned at their 3′ end, which contains the pre-ordered ‘seed’ region. Log₂ fold-change of positively enriched guides (FDR-adjusted p-value<0.05) mapped to the MS2 genome for MOI-100 treatment (FIG. 11C, upper). Schematic of MS2 genome is provided above. Individual guides mapped to highlighted regions of MS2 genome (FIG. 11C, lower). Log₂ fold-change of guides with an FDR-adjusted p-value<0.05 mapped to the MS2 genome for MOI-10 treatment (FIG. 11D).

[0090] FIG. 12 shows enriched MS2 targeting guides mapped to MS2 genome structure. Structure of the MS2 genome inside the viral particle was obtained from a recently published EM structure (see, e.g., Dai X et al., Nature 2017; 541(7635):112-6) and guides (red) significantly enriched in the MOI-100 treatment (FDR-adjusted p-value<0.05) were mapped to the MS2 genome and subsequently visualized in Forna (see, e.g., Kerpedjiev P et al., Bioinformatics 2015; 31(20):3377-9).

[0091] FIGS. 13A-13E show confirmation that enriched guides from the MS2 screen confer protection against MS2 infection. Representative plaque assay for lawns of E. coli expressing wtSauCas9 and sgRNA of different length spotted with phage dilutions indicated (FIGS. 13A-13B). Here, the sgRNA with the highest fold-change in both MOI-10 and -100 samples was chosen for each length. The 23-mer sgRNA produces hazy plaques for an unknown reason. All other guides tested, including a different 23-mer sgRNA, produced clear plaques. In FIG. 13B, guides were two ‘control’ guides that were significantly enriched in both MOI-10 and MOI-100 treatments during phage selection. Scrambled (scr) indicates random shuffling of the target sequence to serve as a non-targeting control. Scrambled sequences were verified against the MS2 genome and its reverse-complement to ensure no partial matches. Quantification of relative PFUs (mean±S.D., n=3) (FIGS. 13C-13D) from data in FIGS. 13A-13B, respectively. In FIG. 13D, guides 14238 and 14210 confer ˜10-fold protection over their scrambled counterparts. The level of protection was similar to perfectly complementary guides in FIG. 13C (see also FIGS. 10E-10F). Predicted binding (FIG. 13E) of guide 14238 (green, SEQ ID NO:308) to a fragment of the MS2 genome (red, nts: 1533-1563, SEQ ID NO:309) using RNAhybrid (see, e.g., Rehmsmeier M et al., RNA 2004; 10(10):1507-17).

[0092] FIGS. 14A-14D show the effect of single-nucleotide mismatches on ssRNA targeting. Heatmap of average loge fold-change for all single-nucleotide mismatch (SNP) guides in MOI-10 (FIG. 14A) and MOI-100 (FIG. 14B) treatment. Deeper blue represents greater negative selection of guides indicating greater sensitivity to mismatches at that position, while deeper black represents greater positive selection indicating that mismatches at that position are more tolerated. Positions are given as distance from 3′ end of the targeting region of the sgRNA. Diagram of target ssRNAs with SNPs (SEQ ID NO2:311-333) for in vitro cleavage assays, as compared to the pUC target (SEQ ID NO:310) (FIG. 14C). Red highlights the region complementary to the guide while black nucleotides indicate the mismatched base in the targeting region. Numbering of nucleotides is labeled from 1 to 23 to reflect positions in FIGS. 14A-14B. Quantification of in vitro cleavage assays (FIG. 14D) with mismatched targets in FIG. 14C. Bars represent the mean±S.D. (n=3). “Wt” indicates 23 nt of perfect complementarity between the sgRNA and the target.

[0093] FIGS. 15A-15D show SauCas9 repression of a GFP reporter in vivo. Comparison of dSpyCas9 and dSauCas9 to repress GFP expression on the DNA and RNA level (FIG. 15A). GFP signal was normalized to OD₆₀₀ to control for difference in cell density between samples. GFP/OD₆₀₀ ratios for guide alone and RNP are normalized to values for a non-targeting guide vector and an Apo protein control, respectively. Target sites were chosen to be adjacent to PAM sites for Spy, Sau, both, or neither as indicated. Note: the slight GFP repression observed with dSpyCas9 using the target sequence adjacent to the Sau PAM (CAGAGT) likely results from the ability of SpyCas9 to use an NAG PAM, albeit with reduced efficiency (see, e.g., Hsu P D et al., Nat. Biotechnol. 2013; 31(9):827-32). ****p<0.0001 by one-way ANOVA. Relative expression of GFP using guides with different length targeting sequences (FIG. 15B). Target site here is the GFP2 sequence chosen for its robust targeting activity. Diagram of targeting sequences across the GFP mRNA and ribosome binding site (RBS) (FIG. 15C, upper). Relative expression of GFP of SauCas9 RNP normalized to sgRNA alone for targeting sequences across the GFP reporter (FIG. 15C, lower). Dashed red line indicates that the sgRNA alone is as efficient as the RNP for GFP repression. Bars in FIGS. 15A-15C represent mean±S.D. (n=3). Non-limiting model for observed SauCas9 ssRNA targeting activity (FIG. 15D). We propose that accessible RNA is cleaved or repressed efficiently while structured and protein-bound RNA is not targeted by SauCas9.

[0094] FIGS. 16A-16C show repression of GFP mRNA. dSauCas9-sgRNA directed against a GFP mRNA (coding) or antisense (noncoding) sequence (FIG. 16A). GFP2 and GFP6 refer to guides diagrammed in FIG. 15C. Dashed red line indicates that the sgRNA alone is as efficient as the SauCas9 RNP for GFP repression. Bars represent mean±S.D. (n=3). ***p<0.001, ****p<0.0001, by one-way ANOVA. Electrophoretic mobility shift assay (EMSA) confirming that dSauCas9 does not bind dsDNA adjacent to non-canonical PAMs (FIG. 16B). Targeting sequence was identical for all substrates but with varied PAM sequences as indicated for the guides in FIG. 15C. Final concentrations of dSauCas9 from left to right: 0, 0.1, 0.5, 1, 5, 10, 50, 100 nM. Comparison of ability of dSau and wtSauCas9 to repress GFP expression in vivo (FIG. 16C). Bars represent mean±S.D. (n=3).

[0095] FIGS. 17A-17E show exemplary protein sequences for Cas9 proteins (from the N to C terminus). Provided are protein sequences for wild-type Staphylococcus aureus Cas9 (SauCas, SEQ ID NO:100) (FIG. 17A), dSauCas9 (D10A and N580A, SEQ ID NO:101) (FIG. 17B), Streptococcus pyogenes Cas9 (SpyCas, SEQ ID NO:102) (FIG. 17C), Francisella novicida Cas9 (FnoCas9, SEQ ID NO:103) (FIG. 17D), and Campylobacter jejuni Cas9 (CjeCas9, SEQ ID NO:104) (FIG. 17E). Further protein sequences can include one or more of SEQ ID NOs:100-104, or a fragment thereof, having one or more conservative amino acid substitutions, as defined herein; and one or more sequences that is substantially identical (e.g., having at least about 80%, 85%, 90%, 95%, 96%, 97%, 98%, 99%, or 100% sequence identity) to one or more of SEQ ID NOs:100-104 or a fragment thereof (e.g., a fragment having of from about 500 to 1500 amino acids, e.g., 500 to 1400, 500 to 1300, 500 to 1200, 500 to 1100, 500 to 1000, 500 to 950, 500 to 900, etc.).

[0096] FIGS. 18A-18E show exemplary single-guide RNA (sgRNA) constructs (from 5′ to 3′ end) employed in the Examples described herein. Provided are in vitro sgRNA constructs (SEQ ID NOs:1-11) (FIG. 18A), in vitro target sequences (SEQ ID NOs:12-39) (FIG. 18B), sgRNA constructs for MS2 plaque assays (SEQ ID NOs:40-52) (FIG. 18C), sgRNA constructs for GFP reporter expression assays (SEQ ID NOs:53-71) (FIG. 18D), and GFP repression targets (SEQ ID NOs:72-76) (FIG. 18E). Further nucleic acid sequences can include one or more sequences that is substantially identical (e.g., having at least about 80%, 85%, 90%, 95%, 96%, 97%, 98%, 99%, or 100% sequence identity) to one or more of SEQ ID NOs:1-76 or a fragment thereof.

[0097] FIGS. 19A-19L show further exemplary protein sequences for Cas9 proteins (from the N to C terminus). Provided are protein sequences for Staphylococcus aureus Cas9 (UniProtKB J7RUA5, SEQ ID NO:110) (FIG. 19A), Campylobacter jejuni subsp. jejuni serotype O:2 Cas9 (UniProtKB Q0P897, SEQ ID NO:111) (FIG. 19B), Streptococcus thermophilus Cas9 (UniProtKB G3ECR1, SEQ ID NO:112) (FIG. 19C), Streptococcus thermophilus (strain ATCC BAA-491/LMD-9) Cas9-1 (UniProtKB Q03LF7, SEQ ID NO:113) (FIG. 19D), Streptococcus thermophilus (strain ATCC BAA-491/LMD-9) Cas9-2 (UniProtKB Q03JI6, SEQ ID NO:114) (FIG. 19E), Wolinella succinogenes Cas9 (UniProtKB Q7MRD3, SEQ ID NO:115) (FIG. 19F), Wolinella succinogenes Cas9/Csx12 (NCBI WP_011139431.1, SEQ ID NO:116) (FIG. 19G), Staphylococcus lugdunensis Cas9 (UniProtKB A0A133QCR3, SEQ ID NO:117) (FIG. 19H), Staphylococcus pseudintermedius ED99 Cas9 (GenBank ADX75954.1, SEQ ID NO:118) (FIG. 19I), Helicobacter mustelae Cas9 (UniProtKB D3UFL8, SEQ ID NO:119) (FIG. 19J), Streptococcus pasteurianus Cas9 (UniProtKB A0A135YMA6, SEQ ID NO:120) (FIG. 19K), and Streptococcus pasteurianus (strain ATCC 43144/JCM 5346/CDC 1723-81) Cas9 (UniProtKB F5X275, SEQ ID NO:121) (FIG. 19L). Further protein sequences can include one or more of SEQ ID NOs:110-121, or a fragment thereof, having one or more conservative amino acid substitutions, as defined herein; and one or more sequences that is substantially identical (e.g., having at least about 80%, 85%, 90%, 95%, 96%, 97%, 98%, 99%, or 100% sequence identity) to one or more of SEQ ID NOs:110-121 or a fragment thereof (e.g., a fragment having of from about 500 to 1500 amino acids, e.g., 500 to 1400, 500 to 1300, 500 to 1200, 500 to 1100, 500 to 1000, 500 to 950, 500 to 900, etc.).

[0098] FIGS. 20A-20J show non-limiting synthetic guiding components. Provided are a schematic (FIG. 20A) of an exemplary synthetic guiding component 2000 (SEQ ID NO:5) including a first portion 2001 (e.g., a crRNA sequence, such as any described herein), a second portion 2002 (e.g., a tracrRNA sequence, such as any described herein), a target portion 2004, and a linker 2005 and a schematic (FIG. 20B) of the exemplary synthetic guiding component 2000 (SEQ ID NO:5) bound to a target site 2011 of an exemplary target sequence 2012 (SEQ ID NO:12). Also provided are non-limiting nucleic acid sequences (FIGS. 20C-20J) that can be employed as a first portion, a linker, and/or a second portion (SEQ ID NOs:150-273). In one non-limiting instance, the synthetic guiding component has a structure provided by formula 5′-W-X-Y-L-Z-3′, in which W is a third portion, X is a targeting portion, Y is a first portion, L is a linker, and Z is a second portion, as described herein. In each instance, U can be substituted by T, and vice versa. Further nucleic acid sequences can include one or more sequences that is substantially identical (e.g., having at least about 80%, 85%, 90%, 95%, 96%, 97%, 98%, 99%, or 100% sequence identity) to one or more of SEQ ID NOs:150-273 or a fragment thereof.

[0099] FIG. 21 shows further non-limiting synthetic guiding components, in which W is a third portion and X is a targeting portion, as described herein (SEQ ID NOs:274-293). Further nucleic acid sequences can include one or more sequences that is substantially identical (e.g., having at least about 80%, 85%, 90%, 95%, 96%, 97%, 98%, 99%, or 100% sequence identity) to one or more of SEQ ID NOs:274-293 or a fragment thereof.

### DETAILED DESCRIPTION OF THE INVENTION

[0100] The present invention relates, in part, to a CRISPR-Cas based system for processing targets including single-stranded nucleic acid sequences. In particular embodiments, described herein are synthetic guiding components for binding and/or cleaving sequences include RNA or modified forms thereof. Such guiding components can be employed in conjunction with a nuclease (e.g., Cas9) that cleaves RNA sequences.

[0101] FIG. 1A provides an exemplary synthetic guiding component 90, which in turn includes a targeting portion 94, a first portion 91, a second portion 92, an optional third portion 93, and a linker 95. In general, the targeting portion 94 includes a nucleic acid sequence that is sufficiently complementary to a desired target site 97 of the target sequence 96. In this way, the guiding component can be programmed to bind to and interact with certain portions of a target sequence. The first and second portions 91,92 provide interactions sites with the nuclease 98 (e.g., a Cas9 nuclease), thereby providing the nuclease in proximity to the target site; and the linker 95 joins the first and second portions.

[0102] For a CRISPR-Cas based system, the first portion is typically derived from a crRNA (CRISPR RNA) sequence, and the second portion is typically derived from a tracrRNA (trans-activating crRNA) sequence. Such crRNA and tracrRNA sequences can be truncated or shortened as compared to wild-type sequences identified in bacteria and archaea, and then the truncated sequences can then be joined by way of a linker to form a synthetic guiding component. The linker can be a bond, an organic linker (e.g., an alkylene or heteroalkylene linker), or a nucleic acid sequence (e.g., any described herein). Exemplary sequences for first portions, second portions, and linkers are described herein.

[0103] Notably, the present invention relates, in part, to synthetic guiding components that lack a PAMmer sequence. While such a PAMmer sequence may be required for cleavage of DNA, we have identified conditions in which PAMmer sequences are not required for cleavage of RNA. Thus, in some non-limiting instances, the synthetic guiding components lack a PAMmer sequence.

[0104] In addition, we also describe conditions in which cleavage efficiency is impaired by duplex regions in the target RNA and in which cleavage efficiency is improved by the presence of mismatched segments that presents a more accessible substrate to ribonucleoprotein complex (e.g., a Cas9-synthetic guiding component complex). Thus, in some non-limiting instances, the guiding component includes one or more modifications that provides target-specificity while reducing substrate-RNP stability. Such modifications can include, e.g., one or more nucleic acid modifications in proximity to the targeting portion of the synthetic guiding component (e.g., one or more nucleic acid modifications in the third portion 93 of the guiding component, such as the 3′ end of the third portion; and/or one or more nucleic acid modifications in the first portion 91 of the guiding component, such as the 5′ end of the first portion).

[0105] Exemplary modifications include one or more modified nucleic acid to promote Cas9 access to the targeting site; or the presence of one or more bulges upon binding of the synthetic guiding component to the target site and/or the target sequence, such as by including one or more unpaired nucleotides in the first portion and/or third portion of the synthetic guiding component when the component is bound to the target sequence. Non-limiting modified nucleic acids include one or more backbone modifications (e.g., modifications to the 2′ position of a nucleic acid, such as any described herein), use of bicyclic sugar analogs, one or more phosphate group modifications, one or more internucleoside linkage modifications (e.g., use of flexible alkane, glycol, or ether linkages between residues), and/or one or more sugar modifications (e.g., unlocked forms, such as GNA, TNA, PNA, etc.).

[0106] FIG. 1B provides another exemplary synthetic guiding component bound to a Cas enzyme. As can be seen, the targeting portion binds to the target site of the single-stranded (ss) target sequence. Various portions of the synthetic guiding component can have one or more modified nucleic acids. In one non-limiting instance, one or more modified nucleic acids are present in proximity to the 5′-end of the targeting portion and/or the 3′-end of the targeting portion (indicated by asterisks in FIG. 1B). In another non-limiting instance, one or more bulges are present in proximity to the 5′-end of the targeting portion and/or the 3′-end of the targeting portion (indicated by asterisks in FIG. 1B).

### Synthetic Guiding Component

[0107] The synthetic guiding component can be a single-guide sequence. In particular embodiments, the sequence of the component can be encoded as a vector suitable for in vivo or in vitro expression.

[0108] FIG. 2A shows an exemplary synthetic guiding component 200 interacting with the target sequence 212. The synthetic guiding component 200 binds to the target site 211 by way of a targeting portion 204 through non-covalent binding 221. In this manner, the targeting portion confers specificity to the guiding component, thereby allowing certain target sequences to be activated, inactivated, and/or modified.

[0109] The synthetic guiding component 200 also includes a first portion 201, a second portion 202, and a linker 205 that covalently links the first and second portions. These portions at the 3′ end 207 are configured to recruit the nuclease (e.g., a Cas nuclease) in proximity to the site of the target sequence. Thus, these portions include nucleic acid sequences that provide preferential binding (e.g., specific binding) of the nuclease. Once in proximity, the nuclease can bind and/or cleave the target sequence or a sequence in proximity to the target sequence in a site-specific, programmable manner. In some embodiments, the first and second portions interact by way of non-covalent binding 222, thereby providing secondary structure that beneficially interacts with the nuclease.

[0110] The synthetic guiding component 200 can optionally include a third portion 203 at the 5′ end 206. The sequence and/or the nucleic acid modifications of the third portion can be optimized to promote binding to the target site or to provide a more accessible substrate to ribonucleoprotein complex.

[0111] FIGS. 20A-20B provide exemplary synthetic guiding components derived from crRNA and tracrRNA sequences. As can be seen, the exemplary synthetic guiding component 2000 includes a first portion 2001 (e.g., a crRNA sequence), a second portion 2002 (e.g., a tracrRNA sequence), a linker 2005 that covalently links the first and second portions, and a targeting portion 2004. Upon binding, the synthetic guiding component 2000 interacts with the target site 2011 of the target sequence 2012.

[0112] The first portion, second portion, and linker can be derived in any useful manner. In one instance, the first portion can include a crRNA sequence, a consensus sequence derived from known crRNA sequences, a modified crRNA sequence, or an entirely synthetic sequence known to bind a Cas nuclease or determined to competitively bind a Cas nuclease when compared to a known crRNA sequence. Exemplary sequences for a first portion are described in FIGS. 20C-20J (SEQ ID NOs:150-155, 179-186, 213-225, 239-243, 251-253, 256, 257, 260, and 262-264). In some embodiments, the first portion is a crRNA sequence that exhibits at least 50%, 60%, 70%, 80%, 90%, 95%, or 99% of sequence complementarity to any one of SEQ ID NOs:150-155, 179-186, 213-225, 239-243, 251-253, 256, 257, 260, and 262-264. In other embodiments, the first portion is a fragment (e.g., having a length of about 4, 5, 6, 7, 8, 9, 10, 11, 12, 13, 14, 15, 16, 17, 18, 19, 20, 22, 24, 26, 28, 30, 32, 34, 36, 38, 40, or more nucleotides) of a crRNA sequence that exhibits at least 50%, 60%, 70%, 80%, 90%, 95%, or 99% of sequence complementarity to any one of SEQ ID NOs:150-155, 179-186, 213-225, 239-243, 251-253, 256, 257, 260, and 262-264.

[0113] In another instance, the second portion can include a tracrRNA sequence, a consensus sequence derived from known tracrRNA sequences, a modified tracrRNA sequence, or an entirely synthetic sequence known to bind a Cas nuclease or determined to competitively bind a Cas nuclease when compared to a known tracrRNA sequence. Exemplary sequences for a second portion are described in FIGS. 20C-20J (SEQ ID NOs:162-178, 192-212, 232-238, 244-250, 254, 255, 258, 259, 261, and 270-273). In some embodiments, the second portion is a tracrRNA sequence that exhibits at least 50%, 60%, 70%, 80%, 90%, 95%, or 99% of sequence complementarity to any one of SEQ ID NOs:162-178, 192-212, 232-238, 244-250, 254, 255, 258, 259, 261, and 270-273. In other embodiments, the second portion is a fragment (e.g., having a length of about 4, 5, 6, 7, 8, 9, 10, 11, 12, 13, 14, 15, 16, 17, 18, 19, 20, 22, 24, 26, 28, 30, 32, 34, 36, 38, 40, or more nucleotides) of a tracrRNA sequence that exhibits at least 50%, 60%, 70%, 80%, 90%, 95%, or 99% of sequence complementarity to any one of SEQ ID NOs:162-178, 192-212, 232-238, 244-250, 254, 255, 258, 259, 261, and 270-273.

[0114] The linker can be any useful linker (e.g., including one or more transcribable elements, such as a nucleotide or a nucleic acid, or including one or more chemical linkers). Further, the linker can be derived from a fragment of any useful tracrRNA sequence (e.g., any described herein). The first and second portions can interact in any useful manner. For example, the first portion can have a sequence portion that is sufficiently complementary to a sequence portion of the second portion, thereby facilitating duplex formation or non-covalent bonding between the first and second portion. In another example, the second portion can include a first sequence portion that is sufficiently complementary to a second sequence portion, thereby facilitating hairpin formation within the second portion. Exemplary sequences for a linker are described in FIGS. 20C-20J (SEQ ID NOs:156-161, 187-191, 226-231, and 265-269). In some embodiments, the linker is a sequence that exhibits at least 50%, 60%, 70%, 80%, 90%, 95%, or 99% of sequence complementarity to any one of SEQ ID NOs:156-161, 187-191, 226-231, and 265-269.

[0115] In another embodiment, the guiding component has a structure of W-X-Y-L-Z, in which W includes a third portion (e.g., any third portions described herein), X includes a targeting portion, Y includes a first portion (e.g., any first portions or crRNA sequences described herein), L is a linker (e.g., a covalent bond, a nucleic acid sequence, or any other useful linker), and Z is a second portion (e.g., any second portions or tracrRNA sequences described herein). In yet another embodiment, the synthetic guiding component is a sequence that exhibits at least 50%, 60%, 70%, 80%, 90%, 95%, or 99% of sequence complementarity to any one SEQ ID NOs:274-293, or a fragment thereof (FIG. 21).

[0116] In addition, the CRISPR components can be formed from any useful combination of one or more nucleic acids (or a polymer of nucleic acids, such as a polynucleotide). Exemplary nucleic acids or polynucleotides of the invention include, but are not limited to, ribonucleic acids (RNAs), deoxyribonucleic acids (DNAs), threose nucleic acids (TNAs), glycol nucleic acids (GNAs), peptide nucleic acids (PNAs), locked nucleic acids (LNAs, including LNA having a β-D-ribo configuration, α-LNA having an α-L-ribo configuration (a diastereomer of LNA), 2′-amino-LNA having a 2′-amino functionalization, and 2′-amino-α-LNA having a 2′-amino functionalization) or hybrids, chimeras, or modified forms thereof. Exemplary modifications include any useful modification, such as to the sugar, the nucleobase, or the internucleoside linkage (e.g., to a linking phosphate/to a phosphodiester linkage/to the phosphodiester backbone). One or more atoms of a pyrimidine nucleobase may be replaced or substituted with optionally substituted amino, optionally substituted thiol, optionally substituted alkyl (e.g., methyl or ethyl), or halo (e.g., chloro or fluoro). In certain embodiments, modifications (e.g., one or more modifications) are present in each of the sugar and the internucleoside linkage. Modifications according to the present invention may be modifications of ribonucleic acids (RNAs) to deoxyribonucleic acids (DNAs), threose nucleic acids (TNAs), glycol nucleic acids (GNAs), peptide nucleic acids (PNAs), locked nucleic acids (LNAs) or hybrids thereof). Additional modifications are described herein.

[0117] Further exemplary synthetic guiding components and portions thereof (e.g., first portions, second portions, third portions, targeting portions, and linkers) are provided in FIGS. 18A-18E, 20A-20J, and 21. Such components and portions also include fragments of any sequence described therein, as well as substantially identical sequences of any described herein.

### Nuclease

[0118] The nuclease may be a Cas9 homolog or ortholog. In some embodiments, the nuclease is codon-optimized for expression in a eukaryotic cell. In some embodiments, the nuclease directs cleavage of one or two strands at the location of the target sequence.

[0119] Any useful Cas protein or complex can be employed that binds to and/or cleaves a single-stranded sequence (e.g., a ss RNA sequence). Exemplary Cas proteins or complexes include those involved in Type I, Type II, or Type III CRISPR/Cas systems, including but not limited to the CRISPR-associated complex for antiviral defense (Cascade, including a RAMP protein), Cas3 and/or Cas 7 (e.g., for Type I systems, such as Type I-E systems), Cas9 (formerly known as Csn1 or Csx12, e.g., such as in Type II systems), Csm (e.g., in Type III-A systems), Cmr (e.g., in Type III-B systems), Cas10 (e.g., in Type III systems), as well as subassemblies or sub-components thereof and assemblies including such Cas proteins or complexes. Additional Cas proteins and complexes are described in Makarova K S et al., “Evolution and classification of the CRISPR-Cas systems,” Nat. Rev. Microbiol. 2011; 9:467-77, which is incorporated herein by reference in its entirety. Non-limiting examples of Cas proteins include Cas1, Cas1B, Cas2, Cas3, Cas4, Cas5, Cas6, Cas7, Cas8, Cas9 (also known as Csn1 and Csx12), Cas10, Csy1, Csy2, Csy3, Cse1, Cse2, Csc1, Csc2, Csa5, Csn2, Csm2, Csm3, Csm4, Csm5, Csm6, Cmr1, Cmr3, Cmr4, Cmr5, Cmr6, Csb1, Csb2, Csb3, Csx17, Csx14, Csx10, Csx16, CsaX, Csx3, Csx1, Csx15, Csf1, Csf2, Csf3, Csf4, homologs thereof, or modified versions thereof.

[0120] In some instances, the nuclease can include one or more mutations, with respect to a corresponding wild-type enzyme, such that the mutated CRISPR enzyme lacks the ability to cleave one or both strands of a target polynucleotide containing a target sequence (e.g., including one or more mutations, such as D10A, N580A, H840A, N854A, and/or N863A in SEQ ID NO:101 or in an amino acid sequence sufficiently aligned with SEQ ID NO:101). Other examples of mutations that render Cas9 a nickase include, without limitation, H840A, N854A, and N863A. In aspects of the invention, nickases may be used for genome editing via homologous recombination. The nuclease can include a nuclear localization sequence (NLS).

[0121] Further exemplary nucleases are provided in FIGS. 17A-17E and 19A-19L. Such nucleases also include fragments of any sequence described therein, as well as substantially identical sequences of any described herein.

### Complex

[0122] A synthetic guiding component and a nuclease can form a complex (i.e., bind via non-covalent interactions). The synthetic guiding component provides target specificity to the complex by comprising a nucleotide sequence that is complementary to a sequence of a target sequence. The nuclease of the complex provides the site-specific activity. In other words, the nuclease is guided to a target sequence (e.g., a target sequence in a chromosomal nucleic acid; a target sequence in a messenger ribonucleic acid; a target sequence in an extrachromosomal nucleic acid, e.g., an episomal nucleic acid, a minicircle, etc.; a target sequence in a mitochondrial nucleic acid; a target sequence in a chloroplast nucleic acid; a target sequence in a plasmid; etc.) by virtue of its association with the protein-binding segment (e.g., the first and/or second portions) of the guiding component.

[0123] Such a complex can be assembled prior to administration to a subject (e.g., a host, a human, a mammal, a pathogen, a plant, etc.). Alternatively, the complex can be transcribed within the subject (e.g., by use of one or more vectors configured to encode the complex, the synthetic guiding component, and/or the nuclease), and administration can include delivering the platform that facilitates such transcription.

### Target Sequences

[0124] The synthetic guiding component can be employed to target any useful nucleic acid sequence (e.g., present in the host's genomic sequence, host's non-coding sequence, and/or the pathogen's genomic sequence). In one instance, the target sequence can include a sequence present in the host's genomic or non-coding sequence in order, e.g., to activate, inactive, or modify expression of a target (e.g., a protein). In another instance, the target sequence can bind to one or more regulator proteins and enhance their transcription and expression. In yet another instance, one or more polypeptides may be up-regulated, as compared to the normal basal rate. Accordingly, the target sequence can be employed to bind to one or more up-regulated polypeptides in order to inactivate or repress transcription/expression of those polypeptides.

[0125] In yet another instance, the target sequence can be employed to activate, inhibit, and/or modify a target sequence (e.g., associated with the presence of a pathogen, etc.). For instance, the target sequence can be configured to activate one or more target sequences encoding proteins that promote programmed cell death or apoptosis (e.g., of the pathogen or of particular tissue types, etc.). For instance, the target sequence can be configured to inactivate or modify one or more target sequences encoding proteins that are suppressed by the pathogen. Exemplary target sequence (e.g., in a pathogen) includes, without limitation, a nucleic acid sequence encoding a virulence factor (e.g., a lipase, a protease, a nuclease (e.g., a DNAse or an RNase), a hemolysin, a hyaluronidase, an immunoglobulin protease, an endotoxin, or an exotoxin), a cell surface protein (e.g., an adhesion), an envelope protein (e.g., a phospholipid, a lipopolysaccharide, a lipoprotein, or a polysaccharide), a glycoprotein, a polysaccharide protein, a transmembrane protein (e.g., an invasin), or a regulatory protein.

[0126] The synthetic guiding component can be employed to activate the target sequence (e.g., the Cas polypeptide can include one or more transcriptional activation domains, which upon binding of the Cas polypeptide to the target sequence, results in enhanced transcription and/or expression of the target sequence), inactivate the target sequence (e.g., the Cas polypeptide can bind to the target sequence, thereby inhibiting expression of one or more proteins encoded by the target sequence; the Cas polypeptide can introduce single-stranded breaks in the target sequence, thereby inactivating the gene; or the Cas polypeptide can include one or more transcriptional repressor domains, which upon binding of the Cas polypeptide to the target sequence, results in reduced transcription and/or expression of the target sequence), and/or modify the target sequence (e.g., the Cas polypeptide can cleave the target sequence of the pathogen and optionally inserts a further nucleic acid sequence).

### Methods and Uses

[0127] The components and complexes can be employed in any useful manner. The present components and complexes can be adapted to recognize the target and, if desired, cleave the target sequence. Alternatively, the components and complexes can be adapted to recognize the target and, if desired, provide a signal indicating presence of the target (e.g., by cleaving a reporter that provides a detectable signal once the reporter is cleaved).

[0128] Yet other uses include methods of treating a patient or a subject in need (e.g., for a particular disease state or infection). Such methods include administration (e.g., prophylactic administration) of an effective amount of a pharmaceutical composition including an effective amount of a component and/or a complex according to the present invention.

[0129] The present invention can also include diagnostic methods, which can include administering to a patient in need an effective amount of a population of a diagnostic component and/or complex, whereupon the recognition of the target is evidenced by a reporter component (moiety) that will enable a diagnosis of the existence of a disease state in the patient.

[0130] The components and complexes can be designed in any useful manner. In one embodiment, the component is designed to bind to one or more targets (e.g., target sequences) that are diagnostic for a disease state (e.g., an autoimmune disease, a blood disease, a brain and nervous system disease, a cancer, a childbirth-related or a pregnancy-related disease, an endocrine disease, an environmentally-acquired disease, an infection (e.g., a bacterial infection or a viral infection), an inherited disease, an immune system disease, or an organ disease).

[0131] In another embodiment, the component is designed to bind to one or more targets (e.g., target sequences) including a single nucleotide polymorphism (SNP), a point mutation (including a combination of point mutations at different locations), a somatic mutation, an aneuploidy, a microsatellite alteration, an epigenetic modification, etc.

[0132] The present invention can include detection methods (e.g., in a test sample), which can include designing a targeting portion of a synthetic guiding component, where the targeting portion is configured to bind to the single-stranded target sequence. Such methods can also include use of a label or a reporter, which can provide a detectable signal upon recognition of the target by the component. In one embodiment, the synthetic guiding component including one or more labels (e.g., any described herein). In another embodiment, the synthetic guiding component can be used in conjunction with a reporter (e.g., a reporter including a non-target strand that optionally includes a label or a combination of labels, such as a quencher and a fluorophore), in which recognition of the target results in the reporter emitting a detectable signal (e.g., in which cleavage of the target and/or non-target strand results in a detectable signal). Exemplary non-target strands can include, e.g., a nucleic acid substrate, such as a mismatched nucleic acid (e.g., including a mismatch between the non-target and target stands for contiguous residues over a region of 7, 8, 9, 10, 11, 12, 13, 14, 15, 16, 17, 18, 19, 20, 21, 22, 23, 24, 25, 30, 35, 40, 45, 50, or more nucleotides) or any described herein.

[0133] Such detection can be conducted in any useful manner, such as in a cleavage assay, a kit, or in a diagnostic device (e.g., a lateral flow assay, a microfluidic device, a flow strip, wells, tubes, droplets, combinations thereof, etc.) in combination with one or more optional labels. Exemplary labels can include one or more fluorescent labels, quencher labels, colorimetric labels, quantum dots, nanoparticles, microparticles, barcodes, radio labels (e.g., RF labels or barcodes), avidin, biotin, tags (e.g., affinity tags), dyes, an enzyme that can optionally include one or more linking agents and/or one or more dyes, aptamers, as well as combinations thereof etc.

[0134] A test sample can include any useful sample, such as a microorganism, a virus, a bacterium, a fungus, a parasite, a helminth, a protozoon, a cell, tissue, a fluid, a swab, a biological sample (e.g., blood, serum, plasma, cerebrospinal fluid, lymph fluid, interstitial fluid, mucus, saliva, sera, spinal fluid, sputum, stool, synovial fluid, urine, a swab from skin or a mucosal membrane, a combination thereof, etc.), a plant, an environmental sample (e.g., surfaces, fluids, air, soil, and/or water), etc. Samples can include one or more biomarkers, such as circulating cells (e.g., circulating tumor cells), cell types (e.g., lymphocytes), cell-free chromatin, cell-free nucleic acid (e.g., cell-free DNA), exosomes, a loss of heterozygosity marker, mutations (e.g., point mutations, aneuploidy, etc.), microRNA (miRNA) signatures, etc.

[0135] A test sample can include any useful target or pathogen. Exemplary targets and pathogens include a bacterium, such as such as Bacillus (e.g., B. anthracis), Enterobacteriaceae (e.g., Salmonella, Escherichia coli, Yersinia pestis, Klebsiella, and Shigella), Yersinia (e.g., Y. pestis or Y. enterocolitica), Staphylococcus (e.g., S. aureus), Streptococcus, Gonorrheae, Enterococcus (e.g., E. faecalis), Listeria (e.g., L. monocytogenes), Brucella (e.g., B. abortus, B. melitensis, or B. suis), Vibrio (e.g., V. cholerae), Corynebacterium diphtheria, Pseudomonas (e.g., P. pseudomallei or P. aeruginosa), Burkholderia (e.g., B. mallei or B. pseudomallei), Shigella (e.g., S. dysenteriae), Rickettsia (e.g., R. rickettsii, R. prowazekii, or R. typhi), Francisella tularensis, Chlamydia psittaci, Coxiella burnetii, Mycoplasma (e.g., M. mycoides), etc.; an allergen, such as mycotoxins, mold spores, or bacterial spores such as Clostridium botulinum and C. perfringens; a toxin, such as ricin, mycotoxin, tetrodotoxin, anthrax toxin, botulinum toxin, staphylococcal entertoxin B, or saxitoxin; a virus (e.g., an RNA virus or a DNA virus, including single-stranded or double-stranded forms thereof), such as Adenoviridae (e.g., adenovirus), Arenaviridae (e.g., Lassa virus or Machupo virus), Bunyaviridae (e.g., Hantavirus, Rift Valley fever virus, or Sin Nombre virus), Caliciviridae (e.g., norovirus), Coronaviridae, Filoviridae (e.g., Ebola virus, Sudan ebolavirus (SUDV), Zaire ebolavirus (EBOV), Bundibugyo virus (BDBV), and Marburg virus (MARV)), Flaviviridae (e.g., dengue virus (DENV), hepatitis C virus (HCV), Japanese encephalitis virus (JEV), St. Louis encephalitis virus (SLEV), West Nile virus (WNV), and yellow fever virus (YFV)), Hepadnaviridae (e.g., hepatitis B virus), Herpesviridae (e.g., herpes simplex viruses), Nairoviridae (e.g., Crimean-Congo hemorrhagic fever orthonairovirus and Crimean-Congo hemorrhagic fever virus), Orthomyxoviridae (e.g., influenza viruses), Papovaviridae (e.g., papilloma viruses), Paramyxoviridae (e.g., respiratory syncytial virus, measles virus, mumps virus, or parainfluenza virus), Parvoviridae, Picornaviridae (e.g., polioviruses), Poxviridae (e.g., variola viruses), Reoviridae (e.g., rotaviruses), Retroviridae (e.g., human T cell lymphotropic viruses (HTLV) and human immunodeficiency viruses (HIV)), Rhabdoviridae (e.g., rabies virus), and Togaviridae (e.g., Chikungunya virus (CHIKV), Eastern equine encephalitis virus (EEEV), encephalitis viruses, Ross River virus (RRV), rubella virus, Sindbis virus (SINV), Venezuelan equine encephalitis virus (VEEV), Western equine encephalitis virus (WEEV), and yellow fever virus)); a protozoon, such as Cryptosporidium parvum, Encephalitozoa, Plasmodium, Toxoplasma gondii, Acanthamoeba, Entamoeba histolytica, Giardia lamblia, Trichomonas vaginalis, Leishmania, or Trypanosoma (e.g., T. brucei and T. Cruzi); a helminth, such as cestodes (tapeworms), trematodes (flukes), or nematodes (roundworms, e.g., Ascaris lumbricoides, Trichuris trichiura, Necator americanus, or Ancylostoma duodenale); a parasite (e.g., any protozoa or helminths described herein); a fungus, such as Aspergilli, Candidae, Coccidioides immitis, and Cryptococci; a pathogen; an environmental contaminant; a water additive; an agricultural marker; a nucleic acid (e.g., oligonucleotides, polynucleotides, nucleotides, nucleosides, molecules of DNA, or molecules of RNA, including a chromosome, a plasmid, a viral genome, a primer, or a gene of any useful pathogen, such as those described herein); or a genetic modification (e.g., antibiotic resistance marker gene). Targets also include food-borne pathogens, such as Salmonella (e.g., Salmonella typhimurium), pathogenic E. coli (e.g., O157:H7), Bacillus (e.g., B. cereus), Clostridium botulinum, Listeria monocytogenes, Yersinia (e.g., Y. enterocolitica), Norovirus (e.g., Norwalk virus), Shigella, Staphylococcus aureus, Toxoplasma gondii, Vibrio (e.g., V. vulnificus, V. cholera, V. parahaemolyticus), Campylobacter jejuni, and Clostridium perfringens; and weaponized pathogens, such asBacillus anthracis, Yersinia pestis, Francisella tularensis, Brucella (e.g., B. suis), Burkholderia mallei, Burkholderia pseudomallei, Shigella, Clostridium botulinum, Variola (e.g., V. major), Filoviridae (e.g., Ebola virus and Marburg virus), Arenaviridae (e.g., Lassa virus and Machupo virus), Clostridium perfringens, any food-borne pathogen (e.g., Salmonella species, Escherichia coli O157:H7, or Shigella), Chlamydia psittaci, Coxiella burnetii, Staphylococcal aureus, Rickettsia (e.g., R. prowazekii or R. rickettsii), Alphavirus (e.g., Venezuelan equine encephalitis virus, eastern equine encephalitis virus, or western equine encephalitis virus), Vibrio cholerae, Cryptosporidium parvum, Henipavirus (e.g., Nipah virus), Bunyaviridae (e.g., Hantavirus or Rift Valley fever virus), Flaviviridae (e.g., Japanese encephalitis virus and Yellow fever virus), and Coccidioides spp.

[0136] In some embodiments, the sample or target includes an RNA virus (e.g., including a portion thereof). Exemplary, non-limiting RNA viruses include

[0137] Arenaviridae (e.g., Guanarito virus, Junín virus, Lassa virus, Lujo virus, lymphocytic choriomeningitis virus, Machupo virus, Sabiá virus, and Whitewater Arroyo virus), Arteriviridae (e.g., arterivirus and equine arteritis virus), Aspiviridae (e.g., citrus psorosis ophiovirus), Astroviridae (e.g., astrovirus), Bornaviridae (e.g., Borna disease virus), Bunyaviridae (e.g., California encephalitis virus and hantavirus), Bunyavirales (e.g., Cache Valley virus, California encephalitis virus, Crimean-Congo hemorrhagic fever, Hantaan virus, La Crosse encephalitis virus, Jamestown Canyon virus, Rift Valley fever virus, and Snowshoe hare virus), Caliciviridae (e.g., Norwalk virus), Coronaviridae (e.g., corona virus), Filoviridae (e.g., Ebola virus, Marburg virus, and Sudan virus), Fimoviridae, Flaviviridae (e.g., dengue virus, hepatitis C virus, Japanese encephalitis virus, St. Louis encephalitis virus, Usutu virus, West Nile virus, yellow fever virus, and Zika virus), Hepeviridae (e.g., hepatitis E virus), Jonviridae, Metaviridae, Nyamiviridae, Orthomyxoviridae (e.g., influenza virus A, influenza virus B, influenza virus C, influenza virus D, isavirus, quaranjavirus, and thogotovirus), Orthohantavirus (e.g., Sin Nombre virus), Orthonairovirus (e.g., Crimean-Congo hemorrhagic fever orthonairovirus, Dugbe virus, Kasokero virus, and Nairobi sheep disease virus), Orthotospovirus, Paramyxoviridae (e.g., avian paramyxovirus, canine distemper virus measles virus, Hendra virus, human parainfluenza viruses, mumps virus, Nipah virus, respiratory syncytial virus, Rinderpest virus, and Sendai virus), Peribunyaviridae, Phasmaviridae, Phenuiviridae (e.g., Rift Valley fever phlebovirus), Picornaviridae (e.g., aphthovirus, cardiovirus, coxsackie virus, enterovirus, erbovirus, hepatovirus, kobuvirus, parechovirus, poliovirus, rhinovirus, and teschovirus), Pseudoviridae, Reoviridae (e.g., Banna virus, cypovirus, reovirus, and rotavirus), Retroviridae (e.g., human immunodeficiency virus (HIV), hepatitis B virus, and cauliflower mosaic virus), Rhabdoviridae (e.g., rabies virus and vesicular stomatitis virus), and Togaviridae (e.g., alphavirus, Chikungunya virus, Eastern equine encephalitis virus, rubella virus, O'Nyong-nyong fever virus, Ross River fever virus, Semliki Forest virus, Sindbis fever virus, Venezuelan equine encephalitis virus, and Western equine encephalitis virus).

### EXAMPLES

### Example 1

### RNA-dependent RNA Targeting by CRISPR-Cas9

[0138] Double-stranded DNA (dsDNA) binding and cleavage by Cas9 is a hallmark of type II CRISPR-Cas bacterial adaptive immunity. All known Cas9 enzymes are thought to recognize DNA exclusively as a natural substrate, providing protection against DNA phage and plasmids. Here, we show that Cas9 enzymes from both subtypes II-A and II-C can recognize and cleave single-stranded RNA (ssRNA) by an RNA-guided mechanism that is independent of a protospacer-adjacent motif (PAM) sequence in the target RNA. RNA-guided RNA cleavage was programmable and site-specific, and we find that this activity can be exploited to reduce infection by single-stranded RNA phage in vivo. We also demonstrate that Cas9 can direct PAM-independent repression of protein synthesis in bacteria. These results indicate that a subset of Cas9 enzymes has the ability to act on both DNA and RNA target sequences, and suggest the potential for use in programmable RNA targeting applications.

[0139] Prokaryotic clustered regularly interspaced short palindromic repeat (CRISPR) systems provide immunity against plasmids and bacteriophage by using foreign DNA stored as CRISPR spacer sequences together with CRISPR-associated (Cas) nucleases to stop infection (see, e.g., Wright A V et al., “Biology and applications of CRISPR systems: harnessing nature's toolbox for genome engineering,” Cell 2016; 164(1-2):29-44; and Mohanraju P et al., “Diverse evolutionary roots and mechanistic variations of the CRISPR-Cas systems,” Science 2016; 353(6299):aad5147 (14 pp.)). One such nuclease, Cas9 of the type II systems, employs a CRISPR RNA (crRNA) and a trans-activating crRNA (tracrRNA) to target spacer-complementary regions (protospacers) on the foreign genetic element to guide double-stranded DNA cleavage (see, e.g., Jinek M et al., “A programmable dual-RNA-guided DNA endonuclease in adaptive bacterial immunity,” Science 2012; 337(6096):816-21). A protospacer adjacent motif (PAM) must also be present for the Cas9-RNA complex to bind and cleave DNA (see, e.g., Jinek M et al., Science 2012; 337(6096):816-21; Gasiunas G et al., “Cas9-crRNA ribonucleoprotein complex mediates specific DNA cleavage for adaptive immunity in bacteria,” Proc. Nat'l Acad. Sci. USA 2012; 109(39):E2579-86; Anders C et al., “Structural basis of PAM-dependent target DNA recognition by the Cas9 endonuclease,” Nature 2014; 513(7519):569-73; and Szczelkun M D et al., “Direct observation of R-loop formation by single RNA-guided Cas9 and Cascade effector complexes,” Proc. Nat'l Acad. Sci. USA 2014; 111(27):9798-803). Combining the crRNA and tracrRNA into a chimeric, single-guide RNA (sgRNA) simplified the system for widespread adoption as a versatile genome editing technology (see, e.g., Jinek M et al., Science 2012; 337(6096):816-21).

[0140] To date, both genetic and biochemical data support the conclusion that in vivo, Cas9 is exclusively a DNA-targeting enzyme. Nonetheless, multiple studies have harnessed Cas9 for RNA targeting under specific circumstances. For example, S. pyogenes Cas9 (SpyCas9) can be supplied with a short DNA oligo containing the PAM sequence (a PAMmer) to induce single-stranded RNA (ssRNA) binding and cutting (see, e.g., O'Connell M R et al., “Programmable RNA recognition and cleavage by CRISPR/Cas9,” Nature 2014; 516(7530):263-6; and Nelles D A et al., “Programmable RNA tracking in live cells with CRISPR/Cas9,” Cell 2016; 165(2):488-96). More recently, it was demonstrated that SpyCas9 could be used to target repetitive RNAs and repress translation in certain mRNAs in the absence of a PAMmer (see, e.g., Liu Y et al., “Targeting cellular mRNAs translation by CRISPR-Cas9,” Sci. Rep. 2016; 6:29652 (9 pp.); and Batra R et al., “Elimination of toxic microsatellite repeat expansion RNA by RNA-targeting Cas9,” Cell 2017; 170(5):899-912).

[0141] A different Cas9 homolog from Francisella novicida (FnoCas9) has been implicated in degradation of a specific mRNA but through a mechanism independent of RNA-based cleavage (see, e.g., Sampson T R et al., “A CRISPR/Cas system mediates bacterial innate immune evasion and virulence,” Nature 2013; 497(7448):254-7). Together with evidence that some Cas9 homologs can target single-stranded DNA substrates under some conditions (see, e.g., Ma E et al., “Single-stranded DNA cleavage by divergent CRISPR-Cas9 enzymes,” Mol. Cell 2015 Nov. 5; 60(3):398-407; and Zhang Y et al., “DNase H activity of Neisseria meningitidis Cas9,” Mol. Cell. 2015; 60(2):242-55), these studies raised the possibility that certain Cas9 enzymes might have intrinsic RNA-guided RNA cleavage activity.

[0142] To determine whether evolutionarily divergent Cas9 homologs have a native capacity for programmable RNA targeting, we compared biochemical behavior of enzymes from the three major Cas9 subtypes. This analysis revealed that certain type II-A and II-C Cas9s can bind and cleave single-stranded RNA sequences with no requirement for a PAM or PAMmer. Furthermore, we found that this activity can inhibit mRNA translation and protect cells from infection by ssRNA phage by a mechanism reminiscent of RNA-guided DNA targeting. These results establish the utility of Cas9 for facile RNA-guided RNA targeting and suggest that this activity may have biological relevance in bacteria. Additional details follow.

### Example 2

### Materials and Methods

[0143] The following materials and methods were employed for data provided herein. Such materials and methods are exemplary, as would be understood by a skilled artisan.

[0144] Phylogenetic tree construction and RNA folding: Cas9 homolog sequences were obtained from Chylinski and colleagues (see, e.g., Chylinski K et al., “Classification and evolution of type II CRISPR-Cas systems,” Nucleic Acids Res. 2014; 42(10):6091-105). A structure-guided alignment was produced using PROMALS3D (see, e.g., Pei J et al., “PROMALS3D: a tool for multiple protein sequence and structure alignments,” Nucleic Acids Res. 2008; 36(7):2295-300), and a maximum-likelihood tree was inferred using PHYML3.0 (see, e.g., Guindon S et al., “New algorithms and methods to estimate maximum-likelihood phylogenies: assessing the performance of PhyML 3.0,” Syst. Biol. 2010; 59(3):307-21). The structure of the pUC ssRNA target was predicted using Mfold (see, e.g., Zuker M, “Mfold web server for nucleic acid folding and hybridization prediction,” Nucleic Acids Res. 2003; 31(13):3406-15).

[0145] Protein purification: All proteins were expressed as His-Maltose-Binding Protein (MBP) fusions (Addgene vector #29706) in E. coli strain BL21 (DE3). Cells were grown to an OD₆₀₀ of 0.6-0.8, induced with 0.4 M isopropylthiogalactoside (IPTG), and then incubated overnight at 16° C. with shaking. Proteins were purified using Superflow Ni-NTA affinity resin (Qiagen, Valencia, CA), followed by a HiTrap HP Heparin column (GE Healthcare, Pittsburgh, PA) and gel filtration on a Superdex 5200 (GE Healthcare, Pittsburgh, PA), as previously described (see, e.g., Jinek M et al., “A programmable dual-RNA-guided DNA endonuclease in adaptive bacterial immunity,” Science 2012; 337(6096):816-21). Cas9 protein sequences can be found in FIGS. 17A-17E.

[0146] Oligonucleotide purification and radiolabeling: DNA oligonucleotides were synthesized by Integrated DNA Technologies, Inc. (Coralville, IA). Target RNAs and sgRNAs were transcribed in vitro as previously described (see, e.g., Sternberg S H et al., “Mechanism of substrate selection by a highly specific CRISPR endoribonuclease,” RNA 2012; 18(4):661-72). DNA targets and in vitro transcribed RNAs were gel purified by 7 M urea denaturing PAGE. Target RNAs and DNAs were 5′ end-labeled with [γ-P32-ATP] by treatment with PNK (New England Biolabs, Inc., Ipswich, MA). T1 sequencing and hydrolysis ladders were prepared according to manufacturer's directions (Ambion, Inc., Grand Island, NY). A list of all sgRNAs and targets can be found in FIGS. 18A-18E.

[0147] In vitro cleavage assays: Cas9 was reconstituted with equimolar sgRNA in 1× cleavage buffer (20 mM Tris-HCl—pH 7.5, 200 mM KCl, 1 mM tris(2-chloroethyl) phosphate (TCEP), 5% glycerol, 5 mM MgCl₂) for 10 min at 37° C., then immediately placed on ice. Cleavage reactions were conducted with 1 nM target and 10 nM reconstituted Cas9-sgRNA in 1× cleavage buffer unless otherwise noted. Structured RNA substrates were prepared by annealing the target strand with 10-fold excess of the non-target strand to ensure that all target is complexed prior to the cleavage reaction. Reactions were incubated at 37° C. for the indicated time and quenched in Heparin-EDTA buffer (10 μg/m1 heparin, 25 mM EDTA) at 25° C. for 5 min. Reactions were diluted with 2× formamide loading buffer and incubated at 95° C. for 5 min prior to separation on a 15% denaturing 7 M urea PAGE gel. Gels were dried overnight and exposed to a phosphor imaging screen (Amersham/GE Healthcare, Pittsburgh, PA). Results were visualized on a Typhoon (GE Healthcare, Pittsburgh, PA) and quantified in ImageQuantTL (v8.1, GE Healthcare, Pittsburgh, PA). Cleavage reactions were fit with a one-phase exponential decay model in Prism7 (GraphPad Software, La Jolla, CA).

[0148] Filter binding and electrophoretic mobility shift assays: Binding reactions consisted of 750 nM catalytically inactive SauCas9 reconstituted with sgRNA to the final concentrations indicated. Radiolabeled target RNA was added to a final concentration of 1 nM and the reactions were incubated at 37° C. for one hour. Bound probe was separated from unbound using a three-filter system on a vacuum manifold (see, e.g., Rio DC, “Filter-binding assay for analysis of RNA-protein interactions,” Cold Spring Harb. Protoc. 2012; 2012(10):1078-81). Membranes were allowed to dry prior to phosphor imaging and quantification. EMSAs were performed in the presence of 300 nM dSauCas9 and 1 nM radiolabeled target strand DNA pre-annealed in the presence of 10× non-target strand. Complexes were incubated at 37° C. for one hour prior to separation on 6% non-denaturing PAGE. Gels were dried prior to phosphor imaging. Binding isotherms were determined in Prism using a one-site binding model.

[0149] MS2 screen and plaque assay: All guides of length 20-23 nt antisense to the MS2 bacteriophage genome were synthesized (CustomArray Inc., Bothell, WA) and cloned into a guide expression vector (see, e.g., Oakes B L et al., “Profiling of engineering hotspots identifies an allosteric CRISPR-Cas9 switch,” Nat. Biotechnol. 2016; 34(6):646-51) modified with the SauCas9 sgRNA scaffold. XL1-Blue E. coli cells with a vector containing a tetracycline-inducible wtSauCas9 construct were made electrocompetent and transformed with the MS2-guide plasmid library in triplicate. Approximately 1×10⁶ transformants were grown for 30 min at 37° C. with shaking prior to addition of antibiotics and 10 nM anhydrotetracycline (aTc) (Sigma-Aldrich Corp., St. Louis, MO) for protein induction. After an additional 30 min of growth, cultures were split into three equal pools and treated with none, 3.3×10⁶, or 3.3×10⁷ MS2 bacteriophage. After three hours of infection, cells were plated on LB-agar supplemented with antibiotics and incubated at 37° C. for 16 hours. Plates were scraped with LB and plasmids were isolated using a MidiPrep kit (Qiagen, Valencia, CA), according to the manufacturer's protocol.

[0150] High-throughput sequencing libraries were prepared by PCR amplification of the variable region of the guide plasmid. Dual unique-molecular identifiers (UMIs), included to separate true single-nucleotide mismatches, as well as duplicates, from PCR artifacts (see, e.g., Kou R et al., “Benefits and challenges with applying unique molecular identifiers in next generation sequencing to detect low frequency mutations,” PLoS One 2016; 11(1):e0146638 (15 pp.)), were incorporated during a single round of PCR. Excess UMIs were removed by Exol digestion (Thermo Scientific, Waltham, MA) prior to library amplification and barcoding. Individual guides (FIG. 18C) were cloned using oligonucleotides synthesized by IDT and co-transformed into XL1-Blue E. coli cells with the SauCas9 vector. Resistance to MS2 bacteriophage was conducted using a soft-agar overlay method (see, e.g., Abudayyeh O O et al., “C2c2 is a single-component programmable RNA-guided RNA-targeting CRISPR effector,” Science 2016; 353(6299):aaf5573 (9 pp.)), and plaque forming units (PFUs) were calculated. To minimize variability in plaquing efficiency, the same phage dilutions were used for all experiments.

[0151] MS2 survival and mismatch analysis: After applying a low-pass filter, reads were trimmed using cutadapt v. 1.14 (see, e.g., Martin M, “Cutadapt removes adapter sequences from high-throughput sequencing reads,” EMBnet.journal 2011; 17(1):10-2); and paired-end overlapping reads were merged using pandaseq for error correction (see, e.g., Masella A P et al., “PANDAseq: PAired-eND Assembler for Illumina sequences,” BMC Bioinformatics 2012; 13:31 (7 pp.)). Reads were mapped to the MS2 genome with bowtie2 v2.3.0 (see, e.g., Langmead B et al., “Fast gapped-read alignment with Bowtie 2,” Nat. Methods 2012; 9(4):357-9) using the “very-sensitive” option and de-duplicated based on the dual-UMI (see, e.g., Smith T et al., “UMI-tools: modeling sequencing errors in Unique Molecular Identifiers to improve quantification accuracy,” Genome Res. 2017; 27(3):491-499). Feature counts were obtained using HTSeq-count (see, e.g., Anders S et al., “HTSeq-a Python framework to work with high-throughput sequencing data,” Bioinformatics 2015; 31(2):166-9). Differential expression was calculated using standard pipelines implemented in “edgeR” (see, e.g., Robinson M D et al., “edgeR: a Bioconductor package for differential expression analysis of digital gene expression data,” Bioinformatics 2010; 26(1):139-40; and McCarthy D J et al., “Differential expression analysis of multifactor RNA-Seq experiments with respect to biological variation,” Nucleic Acids Res. 2012; 40(10):4288-97).

[0152] Significantly enriched guides were defined as those with an FDR-corrected p-value<0.05. Guides with a positive fold-change compared to the control were mapped to the MS2 genome and visualized using the “Sushi” package (see, e.g., Phanstiel D H et al., “Sushi.R: flexible, quantitative and integrative genomic visualizations for publication-quality multi-panel figures,” Bioinformatics 2014; 30(19):2808-10). To examine for nucleotide composition bias, sequences of guides with a significant positive enrichment were aligned at the 3′ end (PAM-proximal) and motifs were analyzed using the WebLogo server (see, e.g., Crooks G E et al., “WebLogo: a sequence logo generator,” Genome Res. 2004; 14(6):1188-90). The distribution of log₂ fold-change values of significantly enriched guides were plotted as box and whisker plots in Prism.

[0153] The secondary structure of the MS2 genome was obtained from Dai X et al., “In situ structures of the genome and genome-delivery apparatus in a single-stranded RNA virus,” Nature 2017; 541(7635):112-6; and reads were mapped and visualized in Forna (see, e.g., Kerpedjiev P et al., “Forna (force-directed RNA): simple and effective online RNA secondary structure diagrams,” Bioinformatics 2015; 31(20):3377-9. Log₂ fold-change values of single-nucleotide mismatch (SNP) guides for each treatment were partitioned by length and averaged at each position. Some of the high-throughput sequencing data are available through the Sequencing Read Archive under the BioProject accession number PRJNA413805.

[0154] E. coli in vivo GFP repression: Based on the system outlined previously, SauCas9 was cloned into a tetracycline-inducible vector, while individual guides are under control of a constitutive promoter (see, e.g., Oakes B L et al., Nat. Biotechnol. 2016; 34(6):646-51). Plasmids were transformed into an E. coli strain with a GFP reporter gene integrated into the chromosome (see, e.g., Qi L S et al., Cell 2013; 152(5):1173-83). Cultures were grown in M9 medium supplemented with 0.4% w/v glucose to mid-log phase and diluted to an OD₆₀₀ of 0.05 prior to transfer to a Tecan Microplate reader (Tecan Systems, San Jose, CA). Protein expression was induced with 10 nM anhydrotetracycline (aTc). GFP and OD₆₀₀ were measured every ten minutes for at least 18 hours. Curves of GFP expression over time were fit with a logistic growth model in Prism. At 80% of the maximum value, or at least after 16 hours of growth, the GFP signal was normalized by cell density at OD₆₀₀.

[0155] To account for effects of guide and protein expression, GFP/OD₆₀₀ was normalized to a null guide or null protein culture, respectively. As expression of different guides change GFP expression levels, the ratio between normalized RNP and guide values was taken to allow comparison of RNP-based repression across different guides. All experiments were conducted in triplicate, and all graphing and quantitative analyses were conducted in Prism. Guide and target sequences can be found in FIGS. 18D-18E.

### Example 3

### Cas9 Catalyzes PAM-independent RNA-guided RNA Cleavage

[0156] To assess whether divergent Cas9 enzymes can catalyze binding to and cleavage of RNA substrates by a mechanism distinct from that of double-stranded DNA cleavage, we tested homologs from the three major subtypes of Cas9 proteins for their ability to cleave single-stranded RNA in vitro (FIGS. 3A-3B and FIGS. 4A-4D). When programmed with a cognate sgRNA, S. aureus Cas9 (SauCas9) and C. jejuni Cas9 (CjeCas9) directed cleavage of RNA in the absence of a PAMmer (FIGS. 3A-3D and FIGS. 4B-4D). No RNA cleavage was detected using SpyCas9, which requires a PAMmer for efficient RNA cleavage in vitro (see, e.g., O'Connell M R et al., Nature 2014; 516(7530):263-6), or using F. novicida Cas9 (FnoCas9). While the cleavage efficiencies for both SauCas9 and CjeCas9 were indistinguishable (FIG. 4D), we initially focused on the activity of SauCas9 due to the abundance of mechanistic and structural data for this enzyme (see, e.g., Nishimasu H et al., “Crystal structure of Staphylococcus aureus Cas9,” Cell 2015; 162(5):1113-26; Friedland A E et al., “Characterization of Staphylococcus aureus Cas9: a smaller Cas9 for all-in-one adeno-associated virus delivery and paired nickase applications,” Genome Biol. 2015; 16:257 (10 pp.); Ran F A et al., “In vivo genome editing using Staphylococcus aureus Cas9,” Nature 2015; 520(7546):186-91; and Kleinstiver B P et al., “Broadening the targeting range of Staphylococcus aureus CRISPR-Cas9 by modifying PAM recognition,” Nat. Biotechnol. 2015; 33(12):1293-8).

[0157] RNA cleavage activity and products were similar to those of canonical Cas9-mediated DNA cleavage activity in vitro. RNA targeting by SauCas9 requires the presence of a guide RNA and a catalytically-active protein, as both apo protein lacking the guide RNA and a catalytically inactive mutant (D10A and N580A) do not cleave RNA (FIG. 5A). Furthermore, addition of EDTA to chelate divalent metal ions abolished RNA cleavage, verifying that divalent metal ions are necessary for catalysis. As with DNA substrates (see, e.g., Sternberg S H et al., “DNA interrogation by the CRISPR RNA-guided endonuclease Cas9,” Nature 2014; 507(7490):62-7), incubation of SauCas9 with an excess of RNA target demonstrated that cleavage is single-turnover (FIGS. 5B-5C).

[0158] Hydrolysis mapping of the cleavage product revealed that the predominant RNA cleavage site is shifted by one nucleotide compared to the site of DNA cleavage (see, e.g., Garneau J E et al., “The CRISPR/Cas bacterial immune system cleaves bacteriophage and plasmid DNA,” Nature 2010; 468(7320):67-71; Jinek M et al., Science 2012; 337(6096):816-21; and Gasiunas G et al., Proc. Nat'l Acad. Sci. USA 2012; 109(39):E2579-86) (FIGS. 5D-5E). The shift is consistent with that observed for PAM-dependent SpyCas9 RNA-cleavage. Without wishing to be limited by mechanism, this shift is likely due to the more compact geometry of an RNA-RNA helix relative to an RNA-DNA hybrid helix (see, e.g., O'Connell M R et al., Nature 2014; 516(7530):263-6; and Wang A H et al., “Molecular structure of r(GCG)d(TATACGC): a DNA-RNA hybrid helix joined to double helical DNA,” Nature 1982; 299(5884):601-4).

[0159] SauCas9 targets ssRNA in the absence of a PAMmer, a contrast to SpyCas9 targeting of ssRNA (see, e.g., O'Connell M R et al., Nature 2014; 516(7530):263-6). Testing SauCas9 in vitro ssRNA cleavage in the presence of a PAMmer (30× molar excess over ssRNA target) revealed that turnover was two-fold slower than the reaction with only target ssRNA (FIG. 3C and FIGS. 6A-6D). SauCas9 ssRNA cleavage conducted in the presence of a non-complementary, control DNA oligo did not yield a similar reduction in cleavage rate (FIG. 6C), indicating that the complementary PAMmer impairs RNA cleavage activity. Consistent with cleavage being guide-dependent, single-stranded RNA that is not complementary to the sgRNA was not cleaved (FIGS. 3C-3D and FIGS. 6A-6D). Double-stranded RNA (dsRNA) was also not a substrate for SauCas9.

[0160] Given that Cas9 proteins are active with different length guide RNA segments (˜20-24 nt) (see, e.g., Chylinski K et al., “The tracrRNA and Cas9 families of type II CRISPR-Cas immunity systems,” RNA Biol. 2013; 10(5):726-37; Ran F A et al., Nature 2015; 520(7546):186-91; Friedland A E et al., Genome Biol. 2015; 16:257 (10 pp.); and Kim E et al., “In vivo genome editing with a small Cas9 orthologue derived from Campylobacter jejuni,” Nat. Commun. 2017; 8:14500 (12 pp.)), we tested whether longer guide segments might enhance ssRNA targeting activity. Increasing the length of the targeting region of the guide up to 23 nt results in tighter binding and more efficient cleavage (FIGS. 7A-7D), mirroring the preference for longer guides for DNA cleavage (see, e.g., Ran F A et al., Nature 2015; 520(7546):186-91; Friedland A E et al., Genome Biol. 2015; 16:257 (10 pp.)). Extending the guide strand complementarity to the target beyond 23 nt did not increase RNA target binding or cleavage efficiency, indicating that 23 nt is the optimal length for in vitro binding and targeting applications. The apparent dissociation constant (K_{d,app}) of the SauCas9-sgRNA complex (23 nt targeting region) for the ssRNA target was 1.8±0.09 nM (FIG. 7D), which is ˜5× weaker than the 0.34±0.03 nM binding affinity measured for a dsDNA substrate of the same sequence.

### Example 4

### Cleavage Efficiency is Impaired by Duplex Regions in Target RNA

[0161] We noted that SauCas9-catalyzed ssRNA cleavage is limited to ˜30% fraction cleaved (see FIGS. 6A-6D), compared to >80% fraction cleaved for ssDNA and dsDNA targets. Greater thermodynamic stability of RNA secondary structures, relative to those in ssDNA (see, e.g., Bercy M et al., “Hairpins under tension: RNA versus DNA,” Nucleic Acids Res. 2015; 43(20):9928-36) might occlude SauCas9-sgRNA binding to an ssRNA target sequence, a possibility that we tested using a panel of partially duplexed RNA substrates (FIGS. 8A-8D).

[0162] Previously, introduction of a short segment of mismatched base pairs to mimic partially unwound dsDNA substrates was shown to enhance the ability of type II-C Cas9s (including CjeCas9) to unwind and cleave dsDNA (see, e.g., Ma E et al., Mol. Cell 2015 Nov. 5; 60(3):398-407). Here, we found that RNA substrates containing a 2- or 6-base pair mismatched segment located near the 5′ or 3′ end of the 23 nt guide RNA region of the sgRNA could not be cleaved (FIGS. 8A-8C, data for substrates 5, 6, 10, and 11). However, when the unpaired region was increased to 12-base pairs, SauCas9 was able to cleave the target strand. There was a slight cleavage preference for RNA substrates in which the 12-base pair mismatched segment is located near the 5′ end of the guide sequence of the sgRNA (FIGS. 8A-8C, data for substrates 7 and 12).

[0163] Interestingly, the 23-base pair mismatched segment RNA substrates (‘Bubble’ substrates 8 and 9) are targeted more efficiently than their ssRNA counterparts (substrates 1 and 2) (FIG. 8C). We measured the binding affinity of all substrates and found that both the 23-base pair mismatched segment RNA and ssRNA substrates are bound with similar affinity (FIG. 8D). Furthermore, the apparent difference in cleavage efficiency was not due to the presence of a double-stranded PAM sequence, as mutating the PAM region does not impair cleavage (FIG. 8C, compare substrates 8 and 9). We hypothesize that RNA containing a mismatched segment presents a more accessible substrate to the Cas9-sgRNA complex due to stable annealing between the ends of the non-target and target strands, whereas the ssRNA substrate alone has ends that are predicted to stabilize a conformation that is partially structured and therefore inaccessible (FIG. 9A).

[0164] An alternative hypothesis to explain the limited cleavage of ssRNA substrates is that SauCas9 enzyme inactivation occurs over the course of the reaction, even with SauCas9 protein-sgRNA (ribonucleoprotein, RNP) present in 10-fold excess relative to the ssRNA substrate. To test this, we spiked reactions with fresh SauCas9 protein alone or SauCas9 RNP after reactions reached equilibrium; however, we did not observe an increase in the amount of ssRNA cleavage (FIGS. 9B-9C). We also tested whether the SauCas9 RNP was able to cleave a second ssRNA substrate that was added to the reaction after it reached completion (FIGS. 9D-9E). After 1 hr of incubation, the addition of a second target ssRNA complementary to the guide RNA resulted in a burst of cleavage activity, whereas a non-complementary ssRNA substrate did not stimulate cleavage. The second target ssRNA was cleaved to a comparable extent to that observed when this second target was the only substrate in the reaction (FIGS. 9D-9E, compare reactions 1 and 3).

[0165] These observations suggest that SauCas9 RNP is still competent and available for cleavage at the end of the reaction and that a property intrinsic to the ssRNA substrate is the limiting factor. We propose that the observed difference in cleavage extents for various RNA substrates reflects the fraction of molecules that are structurally accessible for cleavage by the SauCas9 RNP.

### Example 5

### SauCas9 Confers In Vivo Protection Against RNA Phage

[0166] Based on the biochemical ability of SauCas9 RNP to bind and cleave ssRNA substrates, we wondered whether this activity might provide protection against RNA phage infection in bacteria. To test this, we generated a plasmid library encoding sgRNAs containing guide sequences complementary to the genome of MS2, a single-stranded RNA phage that can infect E. coli. A subset of these sgRNAs contained scrambled guide sequences that should not target MS2, providing negative controls. Another sgRNA subset included single-nucleotide mismatches introduced at each position of a target sequence to test for mismatch sensitivity in ssRNA recognition. This plasmid library, comprising 18,114 sgRNAs (SEQ ID NOs:334-18447), was co-transformed into E. coli along with a vector encoding a catalytically active version of SauCas9, and the population of transformants was subjected to infection by bacteriophage MS2 (FIG. 10A). The experiment was performed in biological triplicate and included an untreated control population and two experimental conditions (multiplicities of infection (MOIs) of 10 and 100). After selection, plasmids were recovered from surviving colonies and sequenced (FIG. 10A).

[0167] We identified between 131 and 166 sgRNAs that were significantly enriched (false discovery rate (FDR)-adjusted p-value<0.05) in the two different MS2 infection conditions (FIG. 10B). The majority of these sgRNAs were perfectly complementary to the MS2 genome, and only three and five control sgRNAs (out of 708 total control sgRNAs) for the MOI-10 and MOI-100 conditions, respectively, were enriched (FIG. 10B).

[0168] The lengths of enriched guide sequences were skewed towards shorter targeting lengths (FIG. 11A, left); however, this likely reflects bias in the cloned input library since the ratio between the enriched guide sequences and those of the library without phage selection are similar (FIG. 11A, right).

[0169] When comparing the degree of enrichment between the different guide lengths, the 23-nt guide segment sgRNAs were preferentially enriched over those of shorter length (FIG. 10C), consistent with the in vitro observation that longer guides are more efficient for directing ssRNA cleavage (see, e.g., FIG. 7C). To assess whether there was any sequence bias within the enriched guides, we aligned guide sequences of all lengths at their 3′ end. These alignments showed no specific sequence bias in the enriched guides relative to those in the unselected library (FIG. 11B). This is consistent with the crystal structure of an SauCas9-sgRNA-DNA bound complex which revealed the absence of base-specific contacts of Cas9 to the target strand (see, Nishimasu H et al., Cell 2015; 162(5):1113-26; and Nishimasu H et al., “Crystal structure of Cas9 in complex with guide RNA and target DNA,” Cell 2014; 156(5):935-49).

[0170] Strikingly, mapping enriched guide sequences onto the MS2 genome showed that enriched sgRNAs were clustered at specific regions, which were consistent across both experimental conditions (FIG. 10D and FIGS. 11C-11D). Together with our biochemical data suggesting that SauCas9 cannot bind or cleave structured RNAs (see, FIGS. 10A-10F), we interpret these targeting “hotspots” to be regions of low structural complexity. It is important to note that sgRNAs containing different guide segment lengths overlap at these regions, possibly indicating that increases in targeting efficiency due to guide length are secondary to target accessibility to the Cas9 RNP. We mapped the enriched guide sequences onto the published secondary structure of the MS2 genome determined through cryoelectron microscopy (see, e.g., Dai X et al., Nature 2017; 541(7635):112-6) (FIG. 12). Guides targeted not only single-stranded, accessible regions but also those that form apparently stable secondary structures. The structure of the MS2 genome was determined on the intact phage particle, however, and may not represent the RNA structure(s) relevant to the infection stage during which SauCas9-mediated protection is crucial.

[0171] Highly enriched sgRNAs from the screen were confirmed for their ability to confer protection against MS2 phage infection through a soft-agar plaque assay. Reconstitution of SauCas9 with a targeting guide confers approximately a ten-fold protection against the RNA phage (FIGS. 10E-10F). No protection was observed in the absence of an sgRNA or SauCas9 protein. Scrambling the sequence of the guide also abrogates protection, confirming that sequence complementary is necessary for phage elimination.

[0172] Guide segments of all lengths tested (20-23 nts) conferred protection to a similar level (FIGS. 13A, 13C), consistent with the result from the MS2 screen that guide segments of all lengths were enriched in ‘hotspot’ regions (FIG. 10D). Two ‘control’ guides were enriched in both the MOI-10 and MOI-100 treatments. Interestingly, both guides conferred protection but their scrambled counterparts did not (FIGS. 13B, 13D). Whereas a possible off-target binding site was found for one guide (#14238, SEQ ID NOs:308, 309, and 14571) within the MS2 genome (FIG. 13E), it remains unclear how guide #14210 (SEQ ID NO:14543) confers protection. Without wishing to be limited by theory, possibly this sgRNA acts by targeting an E. coli host factor that is necessary for infection.

[0173] Screening against the MS2 genome was also used to test the effect of single-nucleotide mismatches on SauCas9's targeting ability. We computed an average fold change (between phage treated and untreated samples) for all sgRNAs that contained a mismatch at the same position, and obtained average values for mismatches at each position across the guide. We observed a pronounced gradient of increasing guide stringency with length. On average, short guides were less sensitive to mismatches, while mismatches in longer sgRNAs led to decreased recovery compared to control samples (FIGS. 14A-14B).

[0174] Previous work and models suggest that shorter guide segments should be more sensitive to mismatches and lead to higher fidelity Cas9 targeting (Fu Y et al., “Improving CRISPR-Cas nuclease specificity using truncated guide RNAs,” Nat. Biotechnol. 2014; 32(3):279-84; and Bisaria N et al., “Lessons from enzyme kinetics reveal specificity principles for RNA-guided nucleases in RNA interference and CRISPR-based genome editing,” Cell Syst. 2017; 4(1):21-9). Further study could elucidate further insights into this unexpected pattern of RNA-targeting stringency, as one shortcoming of this experiment is that mismatched guides were not designed a priori to recognize accessible parts of the MS2 genome.

[0175] Nevertheless, despite potential noise introduced in this analysis due to guide segments that target inaccessible MS2 regions, we observe an interesting correlation between mismatches in the MS2 screen and in vitro biochemical cleavage assays for the sgRNA with a 23 nt guide segment sequence (FIGS. 14C-14D). The first few nucleotides in the ‘seed’ region (guide 3′ end proximal) are sensitive to mismatches, while a central region of sensitivity is also observed, similar to previously demonstrated regions of sensitivity for SpyCas9 DNA cleavage (Cong L et al., “Multiplex genome engineering using CRISPR/Cas systems,” Science 2013; 339(6121):819-23; Jiang W et al., “RNA-guided editing of bacterial genomes using CRISPR-Cas systems,” Nat. Biotechnol. 2013; 31(3):233-9; Fu B X et al., “Distinct patterns of Cas9 mismatch tolerance in vitro and in vivo,” Nucleic Acids Res. 2016; 44(11):5365-77; and Gorski S A et al., “RNA-based recognition and targeting: sowing the seeds of specificity,” Nat. Rev. Mol. Cell Biol. 2017; 18(4):215-28).

### Example 6

### SauCas9 Represses mRNA Translation in E. coli

[0176] An efficient RNA-targeting Cas9 could serve as an important tool in regulating gene expression in vivo. To test the ability of SauCas9 to mediate repression of host gene translation, we targeted dSauCas9 and dSpyCas9 RNPs to a GFP reporter sequence encoded in the E. coli chromosome (see, e.g., Qi L S et al., “Repurposing CRISPR as an RNA-guided platform for sequence-specific control of gene expression,” Cell 2013; 152(5):1173-83). Catalytically inactive versions of Cas9 were used to prevent cleavage of the bacterial chromosome when targeting a site adjacent to a PAM. As expression of Cas9 and sgRNA exerts metabolic stress on E. coli, GFP fluorescence values were normalized by the OD₆₀₀ value to account for differences in cell growth between cultures (see, e.g., Oakes B L et al., “Profiling of engineering hotspots identifies an allosteric CRISPR-Cas9 switch,” Nat. Biotechnol. 2016; 34(6):646-51).

[0177] When using sgRNAs designed to recognize a sequence in the GFP gene adjacent to the appropriate PAM for SauCas9 (NNGRRT) or SpyCas9 (NGG), GFP expression was significantly reduced (FIG. 15A) consistent with CRISPR-interference (CRISPRi) (see, e.g., Qi L S et al., Cell 2013; 152(5):1173-83; and Gilbert L A et al., “Genome-scale CRISPR-mediated control of gene repression and activation,” Cell 2014; 159(3):647-61). When sgRNAs were designed to recognize GFP sequences not flanked by a PAM, dSauCas9 but not dSpyCas9 was able to repress GFP expression. The SauCas9-mediated GFP repression was dependent on sgRNAs that target the coding strand; sgRNAs that recognize the non-coding strand did not result in reduced GFP expression (FIG. 16A). The length of the targeting sequence in vivo corroborates in vitro data, with longer guides working more efficiently (FIG. 15B).

[0178] Different guide sequences displayed variable efficiencies of targeting. We tiled sgRNAs across the GFP mRNA sequence to test the robustness of dSauCas9 to repress GFP expression (FIG. 15C). As no sites were adjacent to PAM sequences, all repression should occur on the translational level. The efficiency of dSauCas9-mediated GFP repression varied according to the target sequence, with some dSauCas9 RNPs reducing GFP signal to 15-30% of that observed in the presence of the sgRNA alone (FIG. 15C, data for substrates GFP2 and GFP6) and others showing no ability to repress GFP expression (FIG. 15C, data for substrates GFP7 and GFP9).

[0179] Electrophoretic mobility shift assays support the conclusion that repression was not occurring at the dsDNA level by promiscuous PAM binding (FIG. 16B). Repression was largely equivalent between catalytically active and inactive forms of SauCas9 (FIG. 16C), suggesting that binding of the Cas9-sgRNA complex to the mRNA was sufficient for repression. This understanding is consistent with in vitro data showing that the enzyme does not catalyze multiple-turnover RNA cleavage.

[0180] Together our biochemical and in vivo data support a model in which SauCas9 can readily bind and cleave bacteriophage RNA and mRNA sequences that are exposed and unstructured (FIG. 15D). Regions that form strong structures are relatively inaccessible to SauCas9 RNP binding, thereby preventing cleavage or repression activity in the studies described herein. Without wishing to be limited by theory, as Cas9 cleavage activity can be limited by target accessibility, we expect that RNA occluded by RNA-binding proteins may also be recalcitrant to cleavage.

### Example 7

### Potential Applications for RNA-targeting CRISPR-Cas Systems

[0181] Prior investigations of CRISPR-Cas9 has generally focused on its function as a double-stranded DNA endonuclease, while the ability of diverse homologs to cleave natural RNA substrates has remained unexplored. Here, we present evidence that type II-A and type II-C Cas9 enzymes can catalyze programmable and PAM-independent single-stranded RNA cleavage. Focusing on SauCas9, we show that this enzyme can be employed both biochemically and in cells to cleave RNA and to regulate genes on both the transcriptional and translational level in parallel by accounting for target site PAM proximity.

[0182] Importantly, SauCas9 ssRNA scission requires only a sgRNA and does not need a PAMmer, thereby simplifying applications (see, e.g., Nelles D A et al., “Applications of Cas9 as an RNA-programmed RNA-binding protein,” Bioessays 2015; 37(7):732-9) and facilitating delivery to cells as a pre-assembled RNP (see, e.g., Zuris J A et al., “Cationic lipid-mediated delivery of proteins enables efficient protein-based genome editing in vitro and in vivo,” Nat. Biotechnol. 2015; 33(1):73-80; and Mout R et al., “Direct cytosolic delivery of CRISPR/Cas9-ribonucleoprotein for efficient gene editing,” ACS Nano 2017; 11(3):2452-8).

[0183] The RNA-targeting capability of SauCas9 and related Cas9 enzymes offers the advantage of repressing viruses whose lifecycles do not involve a DNA genome or intermediate, thereby rendering them inaccessible to Cas9-mediated DNA cleavage. We demonstrated that SauCas9 could be programmed to confer protection to E. coli against MS2, an RNA bacteriophage with no DNA intermediate. Whether RNA-based viral repression by Cas9 occurs in natural systems is not known, but seems possible based on our results.

[0184] Intriguingly, ‘hotspots’ of preferential targeting emerged when tiling guides across the genome, but these sites were devoid of sequence bias. In conjunction with in vitro cleavage data of partially structured RNAs, we suggest that SauCas9 cleavage efficiency is inversely related to structural complexity of the RNA target. As an alternative to the current approach of screening multiple sgRNAs for activity, experimental knowledge about RNA structure, such as SHAPE-seq data (see, e.g., Loughrey D et al., “SHAPE-Seq 2.0: systematic optimization and extension of high-throughput chemical probing of RNA secondary structure with next generation sequencing,” Nucleic Acids Res. 2014; 42(21): e165 (10 pp.)), could simplify target identification for viral targeting and repression experiments. Nevertheless, future work could concentrate on understanding the structural constraints on RNA targeting and methods to improve Cas9 access to duplex RNA regions.

[0185] SauCas9 holds promise for a range of RNA targeting applications. We showed that SauCas9 could repress mRNA translation in E. coli. Repression of the reporter occurred in the absence of the PAM and was specific for targeting of the coding strand. A programmable Cas9 capable of repressing genes on the RNA level has potential advantages over CRISPRi DNA-based techniques (see, e.g., Qi L S et al., Cell 2013; 152(5):1173-83; and Gilbert L A et al., Cell 2014; 159(3):647-61). For example, isoform-specific targeting of different transcripts originating from the same transcription start site or resulting from alternative splicing events might be possible. More broadly, due to its intrinsic ssRNA-binding activity, SauCas9 may have utility as a platform for directing other effector proteins to specific RNA molecules, such as proteins or domains that up-regulate translation or RNA base-modifying enzymes for site-specific epigenetic modification of RNAs.

### Other Embodiments

[0186] All publications, patents, and patent applications mentioned in this specification are incorporated herein by reference to the same extent as if each independent publication or patent application was specifically and individually indicated to be incorporated by reference.

[0187] While the invention has been described in connection with specific embodiments thereof, it will be understood that it is capable of further modifications and this application is intended to cover any variations, uses, or adaptations of the invention following, in general, the principles of the invention and including such departures from the present disclosure that come within known or customary practice within the art to which the invention pertains and may be applied to the essential features hereinbefore set forth, and follows in the scope of the claims.

[0188] Other embodiments are within the claims.

1. A synthetic guide component comprising a structure having the formula (I):
W-X-Y-L-Z or salt thereof, wherein:
W is an optional third portion comprising a nucleic acid sequence of from about 1 to 20 nucleic acids;
X is a targeting portion comprising a nucleic acid sequence configured to bind to a target site of a single-stranded target sequence;
Y is a first portion comprising a nucleic acid sequence configured to interact with a nuclease configured to bind and/or cleave the single-stranded target sequence;
L is a linker; and
Z is a second portion comprising a nucleic acid sequence configured to interact with the nuclease and the first portion;
wherein the synthetic guiding component is configured to bind to the single-stranded target sequence without aid of a proto-spacer adjacent motif (PAM) sequence (PAMmer); and
X is configured to bind to the target site of a single-stranded mRNA target sequence or a single-stranded pathogen target sequence.

2. The synthetic guide component of claim 1, wherein:
Y comprises a nucleic acid sequence having at least 80% sequence identity to any one of SEQ ID NOs:150-155, 179-186, 213-225, 239-243, 251-253, 256, 257, 260, and 262-264; and
Z comprises a nucleic acid sequence having at least 80% sequence identity to any one of SEQ ID NOs: 162-178, 192-212, 232-238, 244-250, 254, 255, 258, 259, 261, and 270-273.

3. The synthetic guide component of claim 1, wherein:
L comprises a bond or a nucleic acid sequence having at least 80% sequence identity to any one of SEQ ID NOs: 156-161, 187-191, 226-231, and 265-269.

4. The synthetic guide component of claim 1, having a nucleic acid sequence having at least 80% sequence identity to any one of SEQ ID NOs: 274-293.

5. The synthetic guide component of claim 1, wherein W and/or Y comprises one or more modified nucleic acids or bulges.

6. The synthetic guide component of claim 1, wherein X has a length of from about 15 to about 30 nucleotides.

7. The synthetic guide component of claim 1, wherein single-stranded target sequence is the single-stranded mRNA target sequence.

8. The synthetic guide component of claim 1, wherein the nuclease is a Cas protein or a modified form thereof.

9. The synthetic guide component of claim 1, wherein the nuclease is a SauCas9 protein or a CjeCas9 protein.

10. The synthetic guide component of claim 1, wherein
Y comprises a nucleic acid sequence having at least 80% sequence identity to any one of SEQ ID NOs: 150-155, or a complement of any of these;
L is a bond or comprises a nucleic acid sequence having at least 80% sequence identity to any one of SEQ ID NOs:156-161, or a complement of any of these;
Z comprises a nucleic acid sequence having at least 80% sequence identity to any one of SEQ ID NOs: 162-178, or a complement of any of these; and
the nuclease comprises an amino acid sequence having at least 80% sequence identity to any one of SEQ ID NOs: 100, 101, and 110.

11. The synthetic guide component of claim 10, wherein the nuclease comprises an amino acid sequence having at least 80% sequence identity to any one of SEQ ID NOs: 100, 101, 104, and 110-121.

12. A substrate comprising:
a synthetic guiding component comprising a structure having the formula (I):
W-X-Y-L-Z or salt thereof; (I)
wherein:
W is an optional third portion comprising a nucleic acid sequence of from about 1 to 20 nucleic acids;
X is a targeting portion comprising a nucleic acid sequence configured to bind to a target site of a single-stranded target sequence;
Y is a first portion comprising a nucleic acid sequence configured to interact with a nuclease configured to bind and/or cleave the single-stranded target sequence;
L is a linker; and
Z is a second portion comprising a nucleic acid sequence configured to interact with the nuclease and the first portion;
wherein the synthetic guiding component is configured to bind and cleave single-stranded RNA sequences without aid of a proto-spacer adjacent motif (PAM) sequence (PAMmer); and
X is configured to bind to the target site of a single-stranded mRNA target sequence or a single-stranded pathogen target sequence; and
a mismatched nucleic acid sequence comprising a plurality of base pair mismatches with the targeting portion of the synthetic guiding component.

13. The substrate of claim 12, wherein X has a length of from about 15 to about 30 nucleotides.

14. The substrate of claim 12, wherein single-stranded target sequence is the single-stranded mRNA target sequence.

15. The substrate of claim 12, wherein:
Y comprises a nucleic acid sequence having at least 80% sequence identity to any one of SEQ ID NOs:150-155, 179-186, 213-225, 239-243, 251-253, 256, 257, 260, and 262-264; and
Z comprises a nucleic acid sequence having at least 80% sequence identity to any one of SEQ ID NOs:162-178, 192-212, 232-238, 244-250, 254, 255, 258, 259, 261, and 270-273.

16. A nucleoprotein complex comprising:
a synthetic guiding component comprising a structure having the formula (I):
W-X-Y-L-Z or salt thereof; and (I)
a nuclease configured to bind and/or cleave a single-stranded target sequence,
wherein:
W is an optional third portion comprising a nucleic acid sequence of from about 1 to 20 nucleic acids;
X is a targeting portion comprising a nucleic acid sequence configured to bind to a target site of a single-stranded target sequence;
Y is a first portion comprising a nucleic acid sequence configured to interact with the nuclease configured to bind and/or cleave the single-stranded target sequence;
L is a linker; and
Z is a second portion comprising a nucleic acid sequence configured to interact with the nuclease and the first portion;
wherein the synthetic guiding component is configured to bind to the target site of the single-stranded target sequence, without aid of a proto-spacer adjacent motif (PAM) sequence (PAMmer); and
the single-stranded target sequence is a single-stranded mRNA target sequence or a single-stranded pathogen target sequence.

17. The nucleoprotein complex of claim 16, wherein the nuclease is a Cas protein or a modified form thereof.

18. The nucleoprotein complex of claim 17, wherein the Cas protein is SauCas9 or CjeCas9.

19. The nucleoprotein complex of claim 17, wherein the nuclease comprises an amino acid sequence having at least 80% sequence identity to any one of SEQ ID NOs: 100, 101, 104, and 110-121.

20. The nucleoprotein complex of claim 17, further comprising:
one or more divalent ions associated with the complex.

The application's sequence listing, which the Patent Office published only in electronic form, follows.

SEQUENCE LISTING (18447 sequences)

SEQ ID NO: 1 - RNA, 102 nt, synthetic construct
  misc_feature 1..102: note = Synthetic construct
  source 1..102: mol_type = other RNA
ggctgtaagcggatgccatagttttagagctagaaatagcaagttaaaataaggctagtccgttatcaacttgaaaaagtggcaccgagtcggtgctttttt

SEQ ID NO: 2 - RNA, 104 nt, synthetic construct
  misc_feature 1..104: note = Synthetic construct
  source 1..104: mol_type = other RNA
ggctgtaagcggatgccatatgggttttagtactctggaaacagaatctactaaaacaaggcaaaatgccgtgtttatctcgtcaacttgttggcgagattttt

SEQ ID NO: 3 - RNA, 140 nt, synthetic construct
  misc_feature 1..140: note = Synthetic construct
  source 1..140: mol_type = other RNA
ggctgtaagcggatgccatatgttttagtccctttttaaatttctttatggtaaaattataatctcataagaaatttaaaaagggactaaaataaagagtttgcgggactctgcggggttacaatcccctaaaaccgctt

SEQ ID NO: 4 - RNA, 94 nt, synthetic construct
  misc_feature 1..94: note = Synthetic construct
  source 1..94: mol_type = other RNA
ggctgtaagcggatgccatatgtttcagttgcgccgaaaggcgctctgtaatcatttaaaagtattttgaacggacctctgtttgacacgtctg

SEQ ID NO: 5 - DNA, 101 bp, synthetic construct
  misc_feature 1..101: note = Synthetic construct
  source 1..101: mol_type = other DNA
ggctgtaagcggatgccatagttttagtactctggaaacagaatctactaaaacaaggcaaaatgccgtgtttatctcgtcaacttgttggcgagattttt

SEQ ID NO: 6 - DNA, 102 bp, synthetic construct
  misc_feature 1..102: note = Synthetic construct
  source 1..102: mol_type = other DNA
ggctgtaagcggatgccatatgttttagtactctggaaacagaatctactaaaacaaggcaaaatgccgtgtttatctcgtcaacttgttggcgagattttt

SEQ ID NO: 7 - DNA, 103 bp, synthetic construct
  misc_feature 1..103: note = Synthetic construct
  source 1..103: mol_type = other DNA
ggctgtaagcggatgccatatggttttagtactctggaaacagaatctactaaaacaaggcaaaatgccgtgtttatctcgtcaacttgttggcgagattttt

SEQ ID NO: 8 - DNA, 104 bp, synthetic construct
  misc_feature 1..104: note = Synthetic construct
  source 1..104: mol_type = other DNA
ggctgtaagcggatgccatatgggttttagtactctggaaacagaatctactaaaacaaggcaaaatgccgtgtttatctcgtcaacttgttggcgagattttt

SEQ ID NO: 9 - DNA, 105 bp, synthetic construct
  misc_feature 1..105: note = Synthetic construct
  source 1..105: mol_type = other DNA
ggctgtaagcggatgccatatggtgttttagtactctggaaacagaatctactaaaacaaggcaaaatgccgtgtttatctcgtcaacttgttggcgagattttt

SEQ ID NO: 10 - DNA, 106 bp, synthetic construct
  misc_feature 1..106: note = Synthetic construct
  source 1..106: mol_type = other DNA
ggctgtaagcggatgccatatggttgttttagtactctggaaacagaatctactaaaacaaggcaaaatgccgtgtttatctcgtcaacttgttggcgagattttt

SEQ ID NO: 11 - RNA, 107 nt, synthetic construct
  misc_feature 1..107: note = Synthetic construct
  source 1..107: mol_type = other RNA
ggctgtaagcggatgccatatggttggttttagtactctggaaacagaatctactaaaacaaggcaaaatgccgtgtttatctcgtcaacttgttggcgagattttt

SEQ ID NO: 12 - RNA, 47 nt, synthetic construct
  misc_feature 1..47: note = Synthetic construct
  source 1..47: mol_type = other RNA
gggcagcattcaaccatatggcatccgcttacagccaagctgtgacc

SEQ ID NO: 13 - RNA, 47 nt, synthetic construct; identical to SEQ ID NO: 12
  misc_feature 1..47: note = Synthetic construct
  source 1..47: mol_type = other RNA

SEQ ID NO: 14 - RNA, 47 nt, synthetic construct
  misc_feature 1..47: note = Synthetic construct
  source 1..47: mol_type = other RNA
ggtcacagcttggctgtaagcggatgccatatggttgaatgctgccc

SEQ ID NO: 15 - DNA, 47 bp, synthetic construct
  misc_feature 1..47: note = Synthetic construct
  source 1..47: mol_type = other DNA
gggcagcattcaaccatatggcatccgcttacagccaagctgtgacc

SEQ ID NO: 16 - DNA, 47 bp, synthetic construct; identical to SEQ ID NO: 15
  misc_feature 1..47: note = Synthetic construct
  source 1..47: mol_type = other DNA

SEQ ID NO: 17 - DNA, 47 bp, synthetic construct
  misc_feature 1..47: note = Synthetic construct
  source 1..47: mol_type = other DNA
ggtcacagcttggctgtaagcggatgccatatggttgaatgctgccc

SEQ ID NO: 18 - DNA, 21 bp, synthetic construct
  misc_feature 1..21: note = Synthetic construct
  source 1..21: mol_type = other DNA
ccatatggttgaatgctgccc

SEQ ID NO: 19 - DNA, 21 bp, synthetic construct
  misc_feature 1..21: note = Synthetic construct
  source 1..21: mol_type = other DNA
gaagccctgaaagacgcgcag

SEQ ID NO: 20 - RNA, 47 nt, synthetic construct; identical to SEQ ID NO: 14
  misc_feature 1..47: note = Synthetic construct
  source 1..47: mol_type = other RNA

SEQ ID NO: 21 - RNA, 47 nt, synthetic construct
  misc_feature 1..47: note = Synthetic construct
  source 1..47: mol_type = other RNA
gggcagccaagtcccatatggcatccgcttacagccaagctgtgacc

SEQ ID NO: 22 - RNA, 47 nt, synthetic construct; identical to SEQ ID NO: 21
  misc_feature 1..47: note = Synthetic construct
  source 1..47: mol_type = other RNA

SEQ ID NO: 23 - RNA, 47 nt, synthetic construct; identical to SEQ ID NO: 14
  misc_feature 1..47: note = Synthetic construct
  source 1..47: mol_type = other RNA

SEQ ID NO: 24 - RNA, 47 nt, synthetic construct
  misc_feature 1..47: note = Synthetic construct
  source 1..47: mol_type = other RNA
ggtcacagcttggctgtaagcggatgccatataattgaatgctgccc

SEQ ID NO: 25 - RNA, 47 nt, synthetic construct
  misc_feature 1..47: note = Synthetic construct
  source 1..47: mol_type = other RNA
ggtcacagcttggctgtaagcggatgcctataaattgaatgctgccc

SEQ ID NO: 26 - RNA, 47 nt, synthetic construct
  misc_feature 1..47: note = Synthetic construct
  source 1..47: mol_type = other RNA
ggtcacagcttggctgtaagcgttacagtataaattgaatgctgccc

SEQ ID NO: 27 - RNA, 47 nt, synthetic construct
  misc_feature 1..47: note = Synthetic construct
  source 1..47: mol_type = other RNA
ggtcacagcttaatgaattcaattacagtataaattgaatgctgccc

SEQ ID NO: 28 - RNA, 47 nt, synthetic construct
  misc_feature 1..47: note = Synthetic construct
  source 1..47: mol_type = other RNA
ggtcacagcttaactgtaagcggatgccatatggttgaatgctgccc

SEQ ID NO: 29 - RNA, 47 nt, synthetic construct
  misc_feature 1..47: note = Synthetic construct
  source 1..47: mol_type = other RNA
ggtcacagcttaatgaaaagcggatgccatatggttgaatgctgccc

SEQ ID NO: 30 - RNA, 47 nt, synthetic construct
  misc_feature 1..47: note = Synthetic construct
  source 1..47: mol_type = other RNA
ggtcacagcttaatgaattcaatatgccatatggttgaatgctgccc

SEQ ID NO: 31 - RNA, 47 nt, synthetic construct; identical to SEQ ID NO: 12
  misc_feature 1..47: note = Synthetic construct
  source 1..47: mol_type = other RNA

SEQ ID NO: 32 - RNA, 38 nt, synthetic construct
  misc_feature 1..38: note = Synthetic construct
  source 1..38: mol_type = other RNA
gggattcaaccatatggcatccgcttacagccaagctg

SEQ ID NO: 33 - RNA, 43 nt, synthetic construct
  misc_feature 1..43: note = Synthetic construct
  source 1..43: mol_type = other RNA
gggttttattttggatttggaaacgagagtttctggtcatgaa

SEQ ID NO: 34 - DNA, 47 bp, synthetic construct
  misc_feature 1..47: note = Synthetic construct
  source 1..47: mol_type = other DNA
gggcagctgtcccccatatggcatccgcttacagccaagctgtgacc

SEQ ID NO: 35 - DNA, 47 bp, synthetic construct
  misc_feature 1..47: note = Synthetic construct
  source 1..47: mol_type = other DNA
ggtcacagcttggctgtaagcggatgccatatgggggacagctgccc

SEQ ID NO: 36 - DNA, 47 bp, synthetic construct
  misc_feature 1..47: note = Synthetic construct
  source 1..47: mol_type = other DNA
gggcagcctgtccccatatggcatccgcttacagccaagctgtgacc

SEQ ID NO: 37 - DNA, 47 bp, synthetic construct
  misc_feature 1..47: note = Synthetic construct
  source 1..47: mol_type = other DNA
ggtcacagcttggctgtaagcggatgccatatggggacaggctgccc

SEQ ID NO: 38 - DNA, 47 bp, synthetic construct
  misc_feature 1..47: note = Synthetic construct
  source 1..47: mol_type = other DNA
gggcagctatttgccatatggcatccgcttacagccaagctgtgacc

SEQ ID NO: 39 - DNA, 47 bp, synthetic construct
  misc_feature 1..47: note = Synthetic construct
  source 1..47: mol_type = other DNA
ggtcacagcttggctgtaagcggatgccatatggcaaatagctgccc

SEQ ID NO: 40 - RNA, 104 nt, synthetic construct
  misc_feature 1..104: note = Synthetic construct
  source 1..104: mol_type = other RNA
tagacgagcccaccgcttagacgttttagtactctggaaacagaatctactaaaacaaggcaaaatgccgtgtttatctcgtcaacttgttggcgagatttttt

SEQ ID NO: 41 - RNA, 105 nt, synthetic construct
  misc_feature 1..105: note = Synthetic construct
  source 1..105: mol_type = other RNA
atcccgggtcctctctttagggggttttagtactctggaaacagaatctactaaaacaaggcaaaatgccgtgtttatctcgtcaacttgttggcgagatttttt

SEQ ID NO: 42 - RNA, 105 nt, synthetic construct
  misc_feature 1..105: note = Synthetic construct
  source 1..105: mol_type = other RNA
gtgcttgtcccccagggtcgtatgttttagtactctggaaacagaatctactaaaacaaggcaaaatgccgtgtttatctcgtcaacttgttggcgagatttttt

SEQ ID NO: 43 - RNA, 104 nt, synthetic construct
  misc_feature 1..104: note = Synthetic construct
  source 1..104: mol_type = other RNA
gagaatcccgggtcctctctttgttttagtactctggaaacagaatctactaaaacaaggcaaaatgccgtgtttatctcgtcaacttgttggcgagatttttt

SEQ ID NO: 44 - RNA, 104 nt, synthetic construct
  misc_feature 1..104: note = Synthetic construct
  source 1..104: mol_type = other RNA
gactctgcttgctggcactactgttttagtactctggaaacagaatctactaaaacaaggcaaaatgccgtgtttatctcgtcaacttgttggcgagatttttt

SEQ ID NO: 45 - RNA, 105 nt, synthetic construct
  misc_feature 1..105: note = Synthetic construct
  source 1..105: mol_type = other RNA
acttcgcttgtaggcaccttgatgttttagtactctggaaacagaatctactaaaacaaggcaaaatgccgtgtttatctcgtcaacttgttggcgagatttttt

SEQ ID NO: 46 - RNA, 104 nt, synthetic construct
  misc_feature 1..104: note = Synthetic construct
  source 1..104: mol_type = other RNA
attcatatcaggctccttacaggttttagtactctggaaacagaatctactaaaacaaggcaaaatgccgtgtttatctcgtcaacttgttggcgagatttttt

SEQ ID NO: 47 - RNA, 103 nt, synthetic construct
  misc_feature 1..103: note = Synthetic construct
  source 1..103: mol_type = other RNA
gaggtccctgggccgaagcccgttttagtactctggaaacagaatctactaaaacaaggcaaaatgccgtgtttatctcgtcaacttgttggcgagatttttt

SEQ ID NO: 48 - RNA, 102 nt, synthetic construct
  misc_feature 1..102: note = Synthetic construct
  source 1..102: mol_type = other RNA
ttcgatgtaagtcaagttttgttttagtactctggaaacagaatctactaaaacaaggcaaaatgccgtgtttatctcgtcaacttgttggcgagatttttt

SEQ ID NO: 49 - RNA, 105 nt, synthetic construct
  misc_feature 1..105: note = Synthetic construct
  source 1..105: mol_type = other RNA
tataccgctttcagttttcatttgttttagtactctggaaacagaatctactaaaacaaggcaaaatgccgtgtttatctcgtcaacttgttggcgagatttttt

SEQ ID NO: 50 - RNA, 105 nt, synthetic construct
  misc_feature 1..105: note = Synthetic construct
  source 1..105: mol_type = other RNA
gttctattcttcatttcgttacagttttagtactctggaaacagaatctactaaaacaaggcaaaatgccgtgtttatctcgtcaacttgttggcgagatttttt

SEQ ID NO: 51 - RNA, 104 nt, synthetic construct
  misc_feature 1..104: note = Synthetic construct
  source 1..104: mol_type = other RNA
tacggaccggtctcagggaattgttttagtactctggaaacagaatctactaaaacaaggcaaaatgccgtgtttatctcgtcaacttgttggcgagatttttt

SEQ ID NO: 52 - RNA, 104 nt, synthetic construct
  misc_feature 1..104: note = Synthetic construct
  source 1..104: mol_type = other RNA
ggcatgcgacgtggaactctatgttttagtactctggaaacagaatctactaaaacaaggcaaaatgccgtgtttatctcgtcaacttgttggcgagatttttt

SEQ ID NO: 53 - RNA, 105 nt, synthetic construct
  misc_feature 1..105: note = Synthetic construct
  source 1..105: mol_type = other RNA
catggtacctttctcctctttaagttttagtactctggaaacagaatctactaaaacaaggcaaaatgccgtgtttatctcgtcaacttgttggcgagatttttt

SEQ ID NO: 54 - RNA, 105 nt, synthetic construct
  misc_feature 1..105: note = Synthetic construct
  source 1..105: mol_type = other RNA
ccagtgaaaagttcttctcctttgttttagtactctggaaacagaatctactaaaacaaggcaaaatgccgtgtttatctcgtcaacttgttggcgagatttttt

SEQ ID NO: 55 - RNA, 105 nt, synthetic construct
  misc_feature 1..105: note = Synthetic construct
  source 1..105: mol_type = other RNA
caccatctaattcaacaagaattgttttagtactctggaaacagaatctactaaaacaaggcaaaatgccgtgtttatctcgtcaacttgttggcgagatttttt

SEQ ID NO: 56 - RNA, 105 nt, synthetic construct
  misc_feature 1..105: note = Synthetic construct
  source 1..105: mol_type = other RNA
cagaaaatttgtgcccattaacagttttagtactctggaaacagaatctactaaaacaaggcaaaatgccgtgtttatctcgtcaacttgttggcgagatttttt

SEQ ID NO: 57 - RNA, 105 nt, synthetic construct
  misc_feature 1..105: note = Synthetic construct
  source 1..105: mol_type = other RNA
agcatcaccttcaccctctccacgttttagtactctggaaacagaatctactaaaacaaggcaaaatgccgtgtttatctcgtcaacttgttggcgagatttttt

SEQ ID NO: 58 - RNA, 105 nt, synthetic construct
  misc_feature 1..105: note = Synthetic construct
  source 1..105: mol_type = other RNA
aatttaagggtgagttttccgttgttttagtactctggaaacagaatctactaaaacaaggcaaaatgccgtgtttatctcgtcaacttgttggcgagatttttt

SEQ ID NO: 59 - RNA, 105 nt, synthetic construct
  misc_feature 1..105: note = Synthetic construct
  source 1..105: mol_type = other RNA
gaacaggtagttttccagtagtggttttagtactctggaaacagaatctactaaaacaaggcaaaatgccgtgtttatctcgtcaacttgttggcgagatttttt

SEQ ID NO: 60 - RNA, 105 nt, synthetic construct
  misc_feature 1..105: note = Synthetic construct
  source 1..105: mol_type = other RNA
cgggcatggcactcttgaaaaaggttttagtactctggaaacagaatctactaaaacaaggcaaaatgccgtgtttatctcgtcaacttgttggcgagatttttt

SEQ ID NO: 61 - RNA, 105 nt, synthetic construct
  misc_feature 1..105: note = Synthetic construct
  source 1..105: mol_type = other RNA
aaagatatagtgcgttcctgtacgttttagtactctggaaacagaatctactaaaacaaggcaaaatgccgtgtttatctcgtcaacttgttggcgagatttttt

SEQ ID NO: 62 - RNA, 105 nt, synthetic construct
  misc_feature 1..105: note = Synthetic construct
  source 1..105: mol_type = other RNA
acgcgtcttgtaggtcccgtcatgttttagtactctggaaacagaatctactaaaacaaggcaaaatgccgtgtttatctcgtcaacttgttggcgagatttttt

SEQ ID NO: 63 - RNA, 105 nt, synthetic construct
  misc_feature 1..105: note = Synthetic construct
  source 1..105: mol_type = other RNA
tttaaaatcaataccctttaactgttttagtactctggaaacagaatctactaaaacaaggcaaaatgccgtgtttatctcgtcaacttgttggcgagatttttt

SEQ ID NO: 64 - RNA, 105 nt, synthetic construct
  misc_feature 1..105: note = Synthetic construct
  source 1..105: mol_type = other RNA
gttgaacggaaccatcttcaacggttttagtactctggaaacagaatctactaaaacaaggcaaaatgccgtgtttatctcgtcaacttgttggcgagatttttt

SEQ ID NO: 65 - RNA, 105 nt, synthetic construct
  misc_feature 1..105: note = Synthetic construct
  source 1..105: mol_type = other RNA
atgtgtaatcccagcagcagttagttttagtactctggaaacagaatctactaaaacaaggcaaaatgccgtgtttatctcgtcaacttgttggcgagatttttt

SEQ ID NO: 66 - RNA, 105 nt, synthetic construct; identical to SEQ ID NO: 55
  misc_feature 1..105: note = Synthetic construct
  source 1..105: mol_type = other RNA

SEQ ID NO: 67 - RNA, 104 nt, synthetic construct
  misc_feature 1..104: note = Synthetic construct
  source 1..104: mol_type = other RNA
caccatctaattcaacaagaatgttttagtactctggaaacagaatctactaaaacaaggcaaaatgccgtgtttatctcgtcaacttgttggcgagatttttt

SEQ ID NO: 68 - RNA, 103 nt, synthetic construct
  misc_feature 1..103: note = Synthetic construct
  source 1..103: mol_type = other RNA
caccatctaattcaacaagaagttttagtactctggaaacagaatctactaaaacaaggcaaaatgccgtgtttatctcgtcaacttgttggcgagatttttt

SEQ ID NO: 69 - RNA, 102 nt, synthetic construct
  misc_feature 1..102: note = Synthetic construct
  source 1..102: mol_type = other RNA
caccatctaattcaacaagagttttagtactctggaaacagaatctactaaaacaaggcaaaatgccgtgtttatctcgtcaacttgttggcgagatttttt

SEQ ID NO: 70 - RNA, 105 nt, synthetic construct
  misc_feature 1..105: note = Synthetic construct
  source 1..105: mol_type = other RNA
aattcttgttgaattagatggtggttttagtactctggaaacagaatctactaaaacaaggcaaaatgccgtgtttatctcgtcaacttgttggcgagatttttt

SEQ ID NO: 71 - RNA, 105 nt, synthetic construct
  misc_feature 1..105: note = Synthetic construct
  source 1..105: mol_type = other RNA
cactactggaaaactacctgttcgttttagtactctggaaacagaatctactaaaacaaggcaaaatgccgtgtttatctcgtcaacttgttggcgagatttttt

SEQ ID NO: 72 - DNA, 24 bp, synthetic construct
  misc_feature 1..24: note = Synthetic construct
  source 1..24: mol_type = other DNA
aattcttgttgaattagatggtga

SEQ ID NO: 73 - DNA, 23 bp, synthetic construct
  misc_feature 1..23: note = Synthetic construct
  source 1..23: mol_type = other DNA
cactactggaaaactacctgttc

SEQ ID NO: 74 - DNA, 23 bp, synthetic construct
  misc_feature 1..23: note = Synthetic construct
  source 1..23: mol_type = other DNA
acctatggtgttcaatgcttttc

SEQ ID NO: 75 - DNA, 23 bp, synthetic construct
  misc_feature 1..23: note = Synthetic construct
  source 1..23: mol_type = other DNA
attggcgatggccctgtcctttt

SEQ ID NO: 76 - DNA, 714 bp, synthetic construct
  misc_feature 1..714: note = Synthetic construct
  source 1..714: mol_type = other DNA
atgagcaaaggagaagaacttttcactggagttgtcccaattcttgttgaattagatggtgatgttaatgggcacaaattttctgtccgtggagagggtgaaggtgatgctacaaacggaaaactcacccttaaatttatttgcactactggaaaactacctgttccgtggccaacacttgtcactactctgacctatggtgttcaatgcttttcccgttatccggatcacatgaaacggcatgactttttcaagagtgccatgcccgaaggttatgtacaggaacgcactatatctttcaaagatgacgggacctacaagacgcgtgctgaagtcaagtttgaaggtgatacccttgttaatcgtatcgagttaaagggtattgattttaaagaagatggaaacattcttggacacaaactcgagtacaactttaactcacacaatgtatacatcacggcagacaaacaaaagaatggaatcaaagctaacttcaaaattcgccacaacgttgaagatggttccgttcaactagcagaccattatcaacaaaatactccaattggcgatggccctgtccttttaccagacaaccattacctgtcgacacaatctgtcctttcgaaagatcccaacgaaaagcgtgaccacatggtccttcttgagtttgtaactgctgctgggattacacatggcatggatgagctctacaaa

SEQ ID NO: 77-99 - skipped (23 entries)

SEQ ID NO: 100 - protein, 1054 aa, Staphylococcus aureus
MGKRNYILGLDIGITSVGYGIIDYETRDVIDAGVRLFKEANVENNEGRRSKRGARRLKRRRRHRIQRVKKLLFDYNLLTDHSELSGINPYEARVKGLSQKLSEEEFSAALLHLAKRRGVHNVNEVEEDTGNELSTKEQISRNSKALEEKYVAELQLERLKKDGEVRGSINRFKTSDYVKEAKQLLKVQKAYHQLDQSFIDTYIDLLETRRTYYEGPGEGSPFGWKDIKEWYEMLMGHCTYFPEELRSVKYAYNADLYNALNDLNNLVITRDENEKLEYYEKFQIIENVFKQKKKPTLKQIAKEILVNEEDIKGYRVTSTGKPEFTNLKVYHDIKDITARKEIIENAELLDQIAKILTIYQSSEDIQEELTNLNSELTQEEIEQISNLKGYTGTHNLSLKAINLILDELWHTNDNQIAIFNRLKLVPKKVDLSQQKEIPTTLVDDFILSPVVKRSFIQSIKVINAIIKKYGLPNDIIIELAREKNSKDAQKMINEMQKRNRQTNERIEEIIRTTGKENAKYLIEKIKLHDMQEGKCLYSLEAIPLEDLLNNPFNYEVDHIIPRSVSFDNSFNNKVLVKQEENSKKGNRTPFQYLSSSDSKISYETFKKHILNLAKGKGRISKTKKEYLLEERDINRFSVQKDFINRNLVDTRYATRGLMNLLRSYFRVNNLDVKVKSINGGFTSFLRRKWKFKKERNKGYKHHAEDALIIANADFIFKEWKKLDKAKKVMENQMFEEKQAESMPEIETEQEYKEIFITPHQIKHIKDFKDYKYSHRVDKKPNRELINDTLYSTRKDDKGNTLIVNNLNGLYDKDNDKLKKLINKSPEKLLMYHHDPQTYQKLKLIMEQYGDEKNPLYKYYEETGNYLTKYSKKDNGPVIKKIKYYGNKLNAHLDITDDYPNSRNKVVKLSLKPYRFDVYLDNGVYKFVTVKNLDVIKKENYYEVNSKCYEEAKKLKKISNQAEFIASFYNNDLIKINGELYRVIGVNNDLLNRIEVNMIDITYREYLENMNDKRPPRIIKTIASKTQSIKKYSTDILGNLYEVKSKKHPQIIKKG

SEQ ID NO: 101 - protein, 1054 aa, synthetic construct
  REGION 1..1054: note = Synthetic construct
MGKRNYILGLAIGITSVGYGIIDYETRDVIDAGVRLFKEANVENNEGRRSKRGARRLKRRRRHRIQRVKKLLFDYNLLTDHSELSGINPYEARVKGLSQKLSEEEFSAALLHLAKRRGVHNVNEVEEDTGNELSTKEQISRNSKALEEKYVAELQLERLKKDGEVRGSINRFKTSDYVKEAKQLLKVQKAYHQLDQSFIDTYIDLLETRRTYYEGPGEGSPFGWKDIKEWYEMLMGHCTYFPEELRSVKYAYNADLYNALNDLNNLVITRDENEKLEYYEKFQIIENVFKQKKKPTLKQIAKEILVNEEDIKGYRVTSTGKPEFTNLKVYHDIKDITARKEIIENAELLDQIAKILTIYQSSEDIQEELTNLNSELTQEEIEQISNLKGYTGTHNLSLKAINLILDELWHTNDNQIAIFNRLKLVPKKVDLSQQKEIPTTLVDDFILSPVVKRSFIQSIKVINAIIKKYGLPNDIIIELAREKNSKDAQKMINEMQKRNRQTNERIEEIIRTTGKENAKYLIEKIKLHDMQEGKCLYSLEAIPLEDLLNNPFNYEVDHIIPRSVSFDNSFNNKVLVKQEEASKKGNRTPFQYLSSSDSKISYETFKKHILNLAKGKGRISKTKKEYLLEERDINRFSVQKDFINRNLVDTRYATRGLMNLLRSYFRVNNLDVKVKSINGGFTSFLRRKWKFKKERNKGYKHHAEDALIIANADFIFKEWKKLDKAKKVMENQMFEEKQAESMPEIETEQEYKEIFITPHQIKHIKDFKDYKYSHRVDKKPNRELINDTLYSTRKDDKGNTLIVNNLNGLYDKDNDKLKKLINKSPEKLLMYHHDPQTYQKLKLIMEQYGDEKNPLYKYYEETGNYLTKYSKKDNGPVIKKIKYYGNKLNAHLDITDDYPNSRNKVVKLSLKPYRFDVYLDNGVYKFVTVKNLDVIKKENYYEVNSKCYEEAKKLKKISNQAEFIASFYNNDLIKINGELYRVIGVNNDLLNRIEVNMIDITYREYLENMNDKRPPRIIKTIASKTQSIKKYSTDILGNLYEVKSKKHPQIIKKG

SEQ ID NO: 102 - protein, 1368 aa, Streptococcus pyogenes [sequence omitted]

SEQ ID NO: 103 - protein, 1629 aa, Francisella novicida
MNFKILPIAIDLGVKNTGVFSAFYQKGTSLERLDNKNGKVYELSKDSYTLLMNNRTARRHQRRGIDRKQLVKRLFKLIWTEQLNLEWDKDTQQAISFLFNRRGFSFITDGYSPEYLNIVPEQVKAILMDIFDDYNGEDDLDSYLKLATEQESKISEIYNKLMQKILEFKLMKLCTDIKDDKVSTKTLKEITSYEFELLADYLANYSESLKTQKFSYTDKQGNLKELSYYHHDKYNIQEFLKRHATINDRILDTLLTDDLDIWNFNFEKFDFDKNEEKLQNQEDKDHIQAHLHHFVFAVNKIKSEMASGGRHRSQYFQEITNVLDENNHQEGYLKNFCENLHNKKYSNLSVKNLVNLIGNLSNLELKPLRKYFNDKIHAKADHWDEQKFTETYCHWILGEWRVGVKDQDKKDGAKYSYKDLCNELKQKVTKAGLVDFLLELDPCRTIPPYLDNNNRKPPKCQSLILNPKFLDNQYPNWQQYLQELKKLQSIQNYLDSFETDLKVLKSSKDQPYFVEYKSSNQQIASGQRDYKDLDARILQFIFDRVKASDELLLNEIYFQAKKLKQKASSELEKLESSKKLDEVIANSQLSQILKSQHTNGIFEQGTFLHLVCKYYKQRQRARDSRLYIMPEYRYDKKLHKYNNTGRFDDDNQLLTYCNHKPRQKRYQLLNDLAGVLQVSPNFLKDKIGSDDDLFISKWLVEHIRGFKKACEDSLKIQKDNRGLLNHKINIARNTKGKCEKEIFNLICKIEGSEDKKGNYKHGLAYELGVLLFGEPNEASKPEFDRKIKKFNSIYSFAQIQQIAFAERKGNANTCAVCSADNAHRMQQIKITEPVEDNKDKIILSAKAQRLPAIPTRIVDGAVKKMATILAKNIVDDNWQNIKQVLSAKHQLHIPIITESNAFEFEPALADVKGKSLKDRRKKALERISPENIFKDKNNRIKEFAKGISAYSGANLTDGDFDGAKEELDHIIPRSHKKYGTLNDEANLICVTRGDNKNKGNRIFCLRDLADNYKLKQFETTDDLEIEKKIADTIWDANKKDFKFGNYRSFINLTPQEQKAFRHALFLADENPIKQAVIRAINNRNRTFVNGTQRYFAEVLANNIYLRAKKENLNTDKISFDYFGIPTIGNGRGIAEIRQLYEKVDSDIQAYAKGDKPQASYSHLIDAMLAFCIAADEHRNDGSIGLEIDKNYSLYPLDKNTGEVFTKDIFSQIKITDNEFSDKKLVRKKAIEGFNTHRQMTRDGIYAENYLPILIHKELNEVRKGYTWKNSEEIKIFKGKKYDIQQLNNLVYCLKFVDKPISIDIQISTLEELRNILTTNNIAATAEYYYINLKTQKLHEYYIENYNTALGYKKYSKEMEFLRSLAYRSERVKIKSIDDVKQVLDKDSNFIIGKITLPFKKEWQRLYREWQNTTIKDDYEFLKSFFNVKSITKLHKKVRKDFSLPISTNEGKFLVKRKTWDNNFIYQILNDSDSRADGTKPFIPAFDISKNEIVEAIIDSFTSKNIFWLPKNIELQKVDNKNIFAIDTSKWFEVETPSDLRDIGIATIQYKIDNNSRPKVRVKLDYVIDDDSKINYFMNHSLLKSRYPDKVLEILKQSTIIEFESSGFNKTIKEMLGMKLAGIYNETSNN

SEQ ID NO: 104 - protein, 984 aa, Campylobacter jejuni
MARILAFDIGISSIGWAFSENDELKDCGVRIFTKVENPKTGESLALPRRLARSARKRLARRKARLNHLKHLIANEFKLNYEDYQSFDESLAKAYKGSLISPYELRFRALNELLSKQDFARVILHIAKRRGYDDIKNSDDKEKGAILKAIKQNEEKLANYQSVGEYLYKEYFQKFKENSKEFTNVRNKKESYERCIAQSFLKDELKLIFKKQREFGFSFSKKFEEEVLSVAFYKRALKDFSHLVGNCSFFTDEKRAPKNSPLAFMFVALTRIINLLNNLKNTEGILYTKDDLNALLNEVLKNGTLTYKQTKKLLGLSDDYEFKGEKGTYFIEFKKYKEFIKALGEHNLSQDDLNEIAKDITLIKDEIKLKKALAKYDLNQNQIDSLSKLEFKDHLNISFKALKLVTPLMLEGKKYDEACNELNLKVAINEDKKDFLPAFNETYYKDEVTNPVVLRAIKEYRKVLNALLKKYGKVHKINIELAREVGKNHSQRAKIEKEQNENYKAKKDAELECEKLGLKINSKNILKLRLFKEQKEFCAYSGEKIKISDLQDEKMLEIDHIYPYSRSFDDSYMNKVLVFTKQNQEKLNQTPFEAFGNDSAKWQKIEVLAKNLPTKKQKRILDKNYKDKEQKNFKDRNLNDTRYIARLVLNYTKDYLDFLPLSDDENTKLNDTQKGSKVHVEAKSGMLTSALRHTWGFSAKDRNNHLHHAIDAVIIAYANNSIVKAFSDFKKEQESNSAELYAKKISELDYKNKRKFFEPFSGFRQKVLDKIDEIFVSKPERKKPSGALHEETFRKEEEFYQSYGGKEGVLKALELGKIRKVNGKIVKNGDMFRVDIFKHKKTNKFYAVPIYTMDFALKVLPNKAVARSKKGEIKDWILMDENYEFCFSLYKDSLILIQTKDMQEPEFVYYNAFTSSTVSLIVSKHDNKFETLSKNQKILFKNANEKEVIAKSIGIQNLKVFEKYIVSALGEVTKAEFRQREDFKK

SEQ ID NO: 105-109 - skipped (5 entries)

SEQ ID NO: 110 - protein, 1053 aa, Staphylococcus aureus
MKRNYILGLDIGITSVGYGIIDYETRDVIDAGVRLFKEANVENNEGRRSKRGARRLKRRRRHRIQRVKKLLFDYNLLTDHSELSGINPYEARVKGLSQKLSEEEFSAALLHLAKRRGVHNVNEVEEDTGNELSTKEQISRNSKALEEKYVAELQLERLKKDGEVRGSINRFKTSDYVKEAKQLLKVQKAYHQLDQSFIDTYIDLLETRRTYYEGPGEGSPFGWKDIKEWYEMLMGHCTYFPEELRSVKYAYNADLYNALNDLNNLVITRDENEKLEYYEKFQIIENVFKQKKKPTLKQIAKEILVNEEDIKGYRVTSTGKPEFTNLKVYHDIKDITARKEIIENAELLDQIAKILTIYQSSEDIQEELTNLNSELTQEEIEQISNLKGYTGTHNLSLKAINLILDELWHTNDNQIAIFNRLKLVPKKVDLSQQKEIPTTLVDDFILSPVVKRSFIQSIKVINAIIKKYGLPNDIIIELAREKNSKDAQKMINEMQKRNRQTNERIEEIIRTTGKENAKYLIEKIKLHDMQEGKCLYSLEAIPLEDLLNNPFNYEVDHIIPRSVSFDNSFNNKVLVKQEENSKKGNRTPFQYLSSSDSKISYETFKKHILNLAKGKGRISKTKKEYLLEERDINRFSVQKDFINRNLVDTRYATRGLMNLLRSYFRVNNLDVKVKSINGGFTSFLRRKWKFKKERNKGYKHHAEDALIIANADFIFKEWKKLDKAKKVMENQMFEEKQAESMPEIETEQEYKEIFITPHQIKHIKDFKDYKYSHRVDKKPNRELINDTLYSTRKDDKGNTLIVNNLNGLYDKDNDKLKKLINKSPEKLLMYHHDPQTYQKLKLIMEQYGDEKNPLYKYYEETGNYLTKYSKKDNGPVIKKIKYYGNKLNAHLDITDDYPNSRNKVVKLSLKPYRFDVYLDNGVYKFVTVKNLDVIKKENYYEVNSKCYEEAKKLKKISNQAEFIASFYNNDLIKINGELYRVIGVNNDLLNRIEVNMIDITYREYLENMNDKRPPRIIKTIASKTQSIKKYSTDILGNLYEVKSKKHPQIIKKG

SEQ ID NO: 111 - protein, 984 aa, Campylobacter jejuni; identical to SEQ ID NO: 104

SEQ ID NO: 112 - protein, 1409 aa, Streptococcus thermophilus
MLFNKCIIISINLDFSNKEKCMTKPYSIGLDIGTNSVGWAVITDNYKVPSKKMKVLGNTSKKYIKKNLLGVLLFDSGITAEGRRLKRTARRRYTRRRNRILYLQEIFSTEMATLDDAFFQRLDDSFLVPDDKRDSKYPIFGNLVEEKVYHDEFPTIYHLRKYLADSTKKADLRLVYLALAHMIKYRGHFLIEGEFNSKNNDIQKNFQDFLDTYNAIFESDLSLENSKQLEEIVKDKISKLEKKDRILKLFPGEKNSGIFSEFLKLIVGNQADFRKCFNLDEKASLHFSKESYDEDLETLLGYIGDDYSDVFLKAKKLYDAILLSGFLTVTDNETEAPLSSAMIKRYNEHKEDLALLKEYIRNISLKTYNEVFKDDTKNGYAGYIDGKTNQEDFYVYLKNLLAEFEGADYFLEKIDREDFLRKQRTFDNGSIPYQIHLQEMRAILDKQAKFYPFLAKNKERIEKILTFRIPYYVGPLARGNSDFAWSIRKRNEKITPWNFEDVIDKESSAEAFINRMTSFDLYLPEEKVLPKHSLLYETFNVYNELTKVRFIAESMRDYQFLDSKQKKDIVRLYFKDKRKVTDKDIIEYLHAIYGYDGIELKGIEKQFNSSLSTYHDLLNIINDKEFLDDSSNEAIIEEIIHTLTIFEDREMIKQRLSKFENIFDKSVLKKLSRRHYTGWGKLSAKLINGIRDEKSGNTILDYLIDDGISNRNFMQLIHDDALSFKKKIQKAQIIGDEDKGNIKEVVKSLPGSPAIKKGILQSIKIVDELVKVMGGRKPESIVVEMARENQYTNQGKSNSQQRLKRLEKSLKELGSKILKENIPAKLSKIDNNALQNDRLYLYYLQNGKDMYTGDDLDIDRLSNYDIDHIIPQAFLKDNSIDNKVLVSSASNRGKSDDFPSLEVVKKRKTFWYQLLKSKLISQRKFDNLTKAERGGLLPEDKAGFIQRQLVETRQITKHVARLLDEKFNNKKDENNRAVRTVKIITLKSTLVSQFRKDFELYKVREINDFHHAHDAYLNAVIASALLKKYPKLEPEFVYGDYPKYNSFRERKSATEKVYFYSNIMNIFKKSISLADGRVIERPLIEVNEETGESVWNKESDLATVRRVLSYPQVNVVKKVEEQNHGLDRGKPKGLFNANLSSKPKPNSNENLVGAKEYLDPKKYGGYAGISNSFAVLVKGTIEKGAKKKITNVLEFQGISILDRINYRKDKLNFLLEKGYKDIELIIELPKYSLFELSDGSRRMLASILSTNNKRGEIHKGNQIFLSQKFVKLLYHAKRISNTINENHRKYVENHKKEFEELFYYILEFNENYVGAKKNGKLLNSAFQSWQNHSIDELCSSFIGPTGSERKGLFELTSRGSAADFEFLGVKIPRYRDYTPSSLLKDATLIHQSVTGLYETRIDLAKLGEG

SEQ ID NO: 113 - protein, 1121 aa, Streptococcus thermophilus
MSDLVLGLDIGIGSVGVGILNKVTGEIIHKNSRIFPAAQAENNLVRRTNRQGRRLARRKKHRRVRLNRLFEESGLITDFTKISINLNPYQLRVKGLTDELSNEELFIALKNMVKHRGISYLDDASDDGNSSVGDYAQIVKENSKQLETKTPGQIQLERYQTYGQLRGDFTVEKDGKKHRLINVFPTSAYRSEALRILQTQQEFNPQITDEFINRYLEILTGKRKYYHGPGNEKSRTDYGRYRTSGETLDNIFGILIGKCTFYPDEFRAAKASYTAQEFNLLNDLNNLTVPTETKKLSKEQKNQIINYVKNEKAMGPAKLFKYIAKLLSCDVADIKGYRIDKSGKAEIHTFEAYRKMKTLETLDIEQMDRETLDKLAYVLTLNTEREGIQEALEHEFADGSFSQKQVDELVQFRKANSSIFGKGWHNFSVKLMMELIPELYETSEEQMTILTRLGKQKTTSSSNKTKYIDEKLLTEEIYNPVVAKSVRQAIKIVNAAIKEYGDFDNIVIEMARETNEDDEKKAIQKIQKANKDEKDAAMLKAANQYNGKAELPHSVFHGHKQLATKIRLWHQQGERCLYTGKTISIHDLINNSNQFEVDHILPLSITFDDSLANKVLVYATANQEKGQRTPYQALDSMDDAWSFRELKAFVRESKTLSNKKKEYLLTEEDISKFDVRKKFIERNLVDTRYASRVVLNALQEHFRAHKIDTKVSVVRGQFTSQLRRHWGIEKTRDTYHHHAVDALIIAASSQLNLWKKQKNTLVSYSEDQLLDIETGELISDDEYKESVFKAPYQHFVDTLKSKEFEDSILFSYQVDSKFNRKISDATIYATRQAKVGKDKADETYVLGKIKDIYTQDGYDAFMKIYKKDKSKFLMYRHDPQTFEKVIEPILENYPNKQINEKGKEVPCNPFLKYKEEHGYIRKYSKKGNGPEIKSLKYYDSKLGNHIDITPKDSNNKVVLQSVSPWRADVYFNKTTGKYEILGLKYADLQFEKGTGTYKISQEKYNDIKKKEGVDSDSEFKFTLYKNDLLLVKDTETKEQQLFRFLSRTMPKQKHYVELKPYDKQKFEGGEALIKVLGNVANSGQCKKGLGKSNISIYKVRTDVLGNQHIIKNEGDKPKLDF

SEQ ID NO: 114 - protein, 1388 aa, Streptococcus thermophilus
MTKPYSIGLDIGTNSVGWAVTTDNYKVPSKKMKVLGNTSKKYIKKNLLGVLLFDSGITAEGRRLKRTARRRYTRRRNRILYLQEIFSTEMATLDDAFFQRLDDSFLVPDDKRDSKYPIFGNLVEEKAYHDEFPTIYHLRKYLADSTKKADLRLVYLALAHMIKYRGHFLIEGEFNSKNNDIQKNFQDFLDTYNAIFESDLSLENSKQLEEIVKDKISKLEKKDRILKLFPGEKNSGIFSEFLKLIVGNQADFRKCFNLDEKASLHFSKESYDEDLETLLGYIGDDYSDVFLKAKKLYDAILLSGFLTVTDNETEAPLSSAMIKRYNEHKEDLALLKEYIRNISLKTYNEVFKDDTKNGYAGYIDGKTNQEDFYVYLKKLLAEFEGADYFLEKIDREDFLRKQRTFDNGSIPYQIHLQEMRAILDKQAKFYPFLAKNKERIEKILTFRIPYYVGPLARGNSDFAWSIRKRNEKITPWNFEDVIDKESSAEAFINRMTSFDLYLPEEKVLPKHSLLYETFNVYNELTKVRFIAESMRDYQFLDSKQKKDIVRLYFKDKRKVTDKDIIEYLHAIYGYDGIELKGIEKQFNSSLSTYHDLLNIINDKEFLDDSSNEAIIEEIIHTLTIFEDREMIKQRLSKFENIFDKSVLKKLSRRHYTGWGKLSAKLINGIRDEKSGNTILDYLIDDGISNRNFMQLIHDDALSFKKKIQKAQIIGDEDKGNIKEVVKSLPGSPAIKKGILQSIKIVDELVKVMGGRKPESIVVEMARENQYTNQGKSNSQQRLKRLEKSLKELGSKILKENIPAKLSKIDNNALQNDRLYLYYLQNGKDMYTGDDLDIDRLSNYDIDHIIPQAFLKDNSIDNKVLVSSASNRGKSDDVPSLEVVKKRKTFWYQLLKSKLISQRKFDNLTKAERGGLSPEDKAGFIQRQLVETRQITKHVARLLDEKFNNKKDENNRAVRTVKIITLKSTLVSQFRKDFELYKVREINDFHHAHDAYLNAVVASALLKKYPKLEPEFVYGDYPKYNSFRERKSATEKVYFYSNIMNIFKKSISLADGRVIERPLIEVNEETGESVWNKESDLATVRRVLSYPQVNVVKKVEEQNHGLDRGKPKGLFNANLSSKPKPNSNENLVGAKEYLDPKKYGGYAGISNSFTVLVKGTIEKGAKKKITNVLEFQGISILDRINYRKDKLNFLLEKGYKDIELIIELPKYSLFELSDGSRRMLASILSTNNKRGEIHKGNQIFLSQKFVKLLYHAKRISNTINENHRKYVENHKKEFEELFYYILEFNENYVGAKKNGKLLNSAFQSWQNHSIDELCSSFIGPTGSERKGLFELTSRGSAADFEFLGVKIPRYRDYTPSSLLKDATLIHQSVTGLYETRIDLAKLGEG

SEQ ID NO: 115 - protein, 1059 aa, Wolinella succinogenes
MIERILGVDLGISSLGWAIVEYDKDDEAANRIIDCGVRLFTAAETPKKKESPNKARREARGIRRVLNRRRVRMNMIKKLFLRAGLIQDVDLDGEGGMFYSKANRADVWELRHDGLYRLLKGDELARVLIHIAKHRGYKFIGDDEADEESGKVKKAGVVLRQNFEAAGCRTVGEWLWRERGANGKKRNKHGDYEISIHRDLLVEEVEAIFVAQQEMRSTIATDALKAAYREIAFFVRPMQRIEKMVGHCTYFPEERRAPKSAPTAEKFIAISKFFSTVIIDNEGWEQKIIERKTLEELLDFAVSREKVEFRHLRKFLDLSDNEIFKGLHYKGKPKTAKKREATLFDPNEPTELEFDKVEAEKKAWISLRGAAKLREALGNEFYGRFVALGKHADEATKILTYYKDEGQKRRELTKLPLEAEMVERLVKIGFSDFLKLSLKAIRDILPAMESGARYDEAVLMLGVPHKEKSAILPPLNKTDIDILNPTVIRAFAQFRKVANALVRKYGAFDRVHFELAREINTKGEIEDIKESQRKNEKERKEAADWIAETSFQVPLTRKNILKKRLYIQQDGRCAYTGDVIELERLFDEGYCEIDHILPRSRSADDSFANKVLCLARANQQKTDRTPYEWFGHDAARWNAFETRTSAPSNRVRTGKGKIDRLLKKNFDENSEMAFKDRNLNDTRYMARAIKTYCEQYWVFKNSHTKAPVQVRSGKLTSVLRYQWGLESKDRESHTHHAVDAIIIAFSTQGMVQKLSEYYRFKETHREKERPKLAVPLANFRDAVEEATRIENTETVKEGVEVKRLLISRPPRARVTGQAHEQTAKPYPRIKQVKNKKKWRLAPIDEEKFESFKADRVASANQKNFYETSTIPRVDVYHKKGKFHLVPIYLHEMVLNELPNLSLGTNPEAMDENFFKFSIFKDDLISIQTQGTPKKPAKIIMGYFKNMHGANMVLSSINNSPCEGFTCTPVSMDKKHKDKCKLCPEENRIAGRCLQGFLDYWSQEGLRPPRKEFECDQGVKFALDVKKYQIDPLGYYYEVKQEKRLGTIPQMRSAKKLVKK

SEQ ID NO: 116 - protein, 1409 aa, Wolinella succinogenes
MLVSPISVDLGGKNTGFFSFTDSLDNSQSGTVIYDESFVLSQVGRRSKRHSKRNNLRNKLVKRLFLLILQEHHGLSIDVLPDEIRGLFNKRGYTYAGFELDEKKKDALESDTLKEFLSEKLQSIDRDSDVEDFLNQIASNAESFKDYKKGFEAVFASATHSPNKKLELKDELKSEYGENAKELLAGLRVTKEILDEFDKQENQGNLPRAKYFEELGEYIATNEKVKSFFDSNSLKLTDMTKLIGNISNYQLKELRRYFNDKEMEKGDIWIPNKLHKITERFVRSWHPKNDADRQRRAELMKDLKSKEIMELLTTTEPVMTIPPYDDMNNRGAVKCQTLRLNEEYLDKHLPNWRDIAKRLNHGKFNDDLADSTVKGYSEDSTLLHRLLDTSKEIDIYELRGKKPNELLVKTLGQSDANRLYGFAQNYYELIRQKVRAGIWVPVKNKDDSLNLEDNSNMLKRCNHNPPHKKNQIHNLVAGILGVKLDEAKFAEFEKELWSAKVGNKKLSAYCKNIEELRKTHGNTFKIDIEELRKKDPAELSKEEKAKLRLTDDVILNEWSQKIANFFDIDDKHRQRFNNLFSMAQLHTVIDTPRSGFSSTCKRCTAENRFRSETAFYNDETGEFHKKATATCQRLPADTQRPFSGKIERYIDKLGYELAKIKAKELEGMEAKEIKVPIILEQNAFEYEESLRKSKTGSNDRVINSKKDRDGKKLAKAKENAEDRLKDKDKRIKAFSSGICPYCGDTIGDDGEIDHILPRSHTLKIYGTVFNPEGNLIYVHQKCNQAKADSIYKLSDIKAGVSAQWIEEQVANIKGYKTFSVLSAEQQKAFRYALFLQNDNEAYKKVVDWLRTDQSARVNGTQKYLAKKIQEKLTKMLPNKHLSFEFILADATEVSELRRQYARQNPLLAKAEKQAPSSHAIDAVMAFVARYQKVFKDGTPPNADEVAKLAMLDSWNPASNEPLTKGLSTNQKIEKMIKSGDYGQKNMREVFGKSIFGENAIGERYKPIVVQEGGYYIGYPATVKKGYELKNCKVVTSKNDIAKLEKIIKNQDLISLKENQYIKIFSINKQTISELSNRYFNMNYKNLVERDKEIVGLLEFIVENCRYYTKKVDVKFAPKYIHETKYPFYDDWRRFDEAWRYLQENQNKTSSKDRFVIDKSSLNEYYQPDKNEYKLDVDTQPIWDDFCRWYFLDRYKTANDKKSIRIKARKTFSLLAESGVQGKVFRAKRKIPTGYAYQALPMDNNVIAGDYANILLEANSKTLSLVPKSGISIEKQLDKKLDVIKKTDVRGLAIDNNSFFNADFDTHGIRLIVENTSVKVGNFPISAIDKSAKRMIFRALFEKEKGKRKKKTTISFKESGPVQDYLKVFLKKIVKIQLRTDGSISNIVVRKNAADFTLSFRSEHIQKLLK

SEQ ID NO: 117 - protein, 1054 aa, Staphylococcus lugdunensis
MNQKFILGLDIGITSVGYGLIDYETKNIIDAGVRLFPEANVENNEGRRSKRGSRRLKRRRIHRLERVKKLLEDYNLLDQSQIPQSTNPYAIRVKGLSEALSKDELVIALLHIAKRRGIHKIDVIDSNDDVGNELSTKEQLNKNSKLLKDKFVCQIQLERMNEGQVRGEKNRFKTADIIKEIIQLLNVQKNFHQLDENFINKYIELVEMRREYFEGPGKGSPYGWEGDPKAWYETLMGHCTYFPDELRSVKYAYSADLFNALNDLNNLVIQRDGLSKLEYHEKYHIIENVFKQKKKPTLKQIANEINVNPEDIKGYRITKSGKPQFTEFKLYHDLKSVLFDQSILENEDVLDQIAEILTIYQDKDSIKSKLTELDILLNEEDKENIAQLTGYTGTHRLSLKCIRLVLEEQWYSSRNQMEIFTHLNIKPKKINLTAANKIPKAMIDEFILSPVVKRTFGQAINLINKIIEKYGVPEDIIIELARENNSKDKQKFINEMQKKNENTRKRINEIIGKYGNQNAKRLVEKIRLHDEQEGKCLYSLESIPLEDLLNNPNHYEVDHIIPRSVSFDNSYHNKVLVKQSENSKKSNLTPYQYFNSGKSKLSYNQFKQHILNLSKSQDRISKKKKEYLLEERDINKFEVQKEFINRNLVDTRYATRELTNYLKAYFSANNMNVKVKTINGSFTDYLRKVWKFKKERNHGYKHHAEDALIIANADFLFKENKKLKAVNSVLEKPEIESKQLDIQVDSEDNYSEMFIIPKQVQDIKDFRNFKYSHRVDKKPNRQLINDTLYSTRKKDNSTYIVQTIKDIYAKDNTTLKKQFDKSPEKFLMYQHDPRTFEKLEVIMKQYANEKNPLAKYHEETGEYLTKYSKKNNGPIVKSLKYIGNKLGSHLDVTHQFKSSTKKLVKLSIKPYRFDVYLTDKGYKFITISYLDVLKKDNYYYIPEQKYDKLKLGKAIDKNAKFIASFYKNDLIKLDGEIYKIIGVNSDTRNMIELDLPDIRYKEYCELNNIKGEPRIKKTIGKKVNSIEKLTTDVLGNVFTNTQYTKPQLLFKRGN

SEQ ID NO: 118 - protein, 1334 aa, Staphylococcus pseudintermedius
MGRKPYILSLDIGTGSVGYACMDKGFNVLKYHDKDALGVYLFDGALTAQERRQFRTSRRRKNRRIKRLGLLQELLAPLVQNPNFYQFQRQFAWKNDNMDFKNKSLSEVLSFLGYESKKYPTIYHLQEALLLKDEKFDPELIYMALYHLVKYRGHFLFDHLKIENLTNNDNMHDFVELIETYENLNNIKLNLDYEKTKVIYEILKDNEMTKNDRAKRVKNMEKKLEQFSIMLLGLKFNEGKLFNHADNAEELKGANQSHTFADNYEENLTPFLTVEQSEFIERANKIYLSLTLQDILKGKKSMAMSKVAAYDKFRNELKQVKDIVYKADSTRTQFKKIFVSSKKSLKQYDATPNDQTFSSLCLFDQYLIRPKKQYSLLIKELKKIIPQDSELYFEAENDTLLKVLNTTDNASIPMQINLYEAETILRNQQKYHAEITDEMIEKVLSLIQFRIPYYVGPLVNDHTASKFGWMERKSNESIKPWNFDEVVDRSKSATQFIRRMTNKCSYLINEDVLPKNSLLYQEMEVLNELNATQIRLQTDPKNRKYRMMPQIKLFAVEHIFKKYKTVSHSKFLEIMLNSNHRENFMNHGEKLSIFGTQDDKKFASKLSSYQDMTKIFGDIEGKRAQIEEIIQWITIFEDKKILVQKLKECYPELTSKQINQLKKLNYSGWGRLSEKLLTHAYQGHSIIELLRHSDENFMEILTNDVYGFQNFIKEENQVQSNKIQHQDIANLTTSPALKKGIWSTIKLVRELTSIFGEPEKIIMEFATEDQQKGKKQKSRKQLWDDNIKKNKLKSVDEYKYIIDVANKLNNEQLQQEKLWLYLSQNGKCMYSGQSIDLDALLSPNATKHYEVDHIFPRSFIKDDSIDNKVLVIKKMNQTKGDQVPLQFIQQPYERIAYWKSLNKAGLISDSKLHKLMKPEFTAMDKEGFIQRQLVETRQISVHVRDFLKEEYPNTKVIPMKAKMVSEFRKKFDIPKIRQMNDAHHAIDAYLNGVVYHGAQLAYPNVDLFDFNFKWEKVREKWKALGEFNTKQKSRELFFFKKLEKMEVSQGERLISKIKLDMNHFKINYSRKLANIPQQFYNQTAVSPKTAELKYESNKSNEVVYKGLTPYQTYVVAIKSVNKKGKEKMEYQMIDHYVFDFYKFQNGNEKELALYLAQRENKDEVLDAQIVYSLNKGDLLYINNHPCYFVSRKEVINAKQFELTVEQQLSLYNVMNNKETNVEKLLIEYDFIAEKVINEYHHYLNSKLKEKRVRTFFSESNQTHEDFIKALDELFKVVTASATRSDKIGSRKNSMTHRAFLGKGKDVKIAYTSISGLKTTKPKSLFKLAESRNEL

SEQ ID NO: 119 - protein, 1024 aa, Helicobacter mustelae
MIRTLGIDIGIASIGWAVIEGEYTDKGLENKEIVASGVRVFTKAENPKNKESLALPRTLARSARRRNARKKGRIQQVKHYLSKALGLDLECFVQGEKLATLFQTSKDFLSPWELRERALYRVLDKEELARVILHIAKRRGYDDITYGVEDNDSGKIKKAIAENSKRIKEEQCKTIGEMMYKLYFQKSLNVRNKKESYNRCVGRSELREELKTIFQIQQELKSPWVNEELIYKLLGNPDAQSKQEREGLIFYQRPLKGFGDKIGKCSHIKKGENSPYRACKHAPSAEEFVALTKSINFLKNLTNRHGLCFSQEDMCVYLGKILQEAQKNEKGLTYSKLKLLLDLPSDFEFLGLDYSGKNPEKAVFLSLPSTFKLNKITQDRKTQDKIANILGANKDWEAILKELESLQLSKEQIQTIKDAKLNFSKHINLSLEALYHLLPLMREGKRYDEGVEILQERGIFSKPQPKNRQLLPPLSELAKEESYFDIPNPVLRRALSEFRKVVNALLEKYGGFHYFHIELTRDVCKAKSARMQLEKINKKNKSENDAASQLLEVLGLPNTYNNRLKCKLWKQQEEYCLYSGEKITIDHLKDQRALQIDHAFPLSRSLDDSQSNKVLCLTSSNQEKSNKTPYEWLGSDEKKWDMYVGRVYSSNFSPSKKRKLTQKNFKERNEEDFLARNLVDTGYIGRVTKEYIKHSLSFLPLPDGKKEHIRIISGSMTSTMRSFWGVQEKNRDHHLHHAQDAIIIACIEPSMIQKYTTYLKDKETHRLKSHQKAQILREGDHKLSLRWPMSNFKDKIQESIQNIIPSHHVSHKVTGELHQETVRTKEFYYQAFGGEEGVKKALKFGKIREINQGIVDNGAMVRVDIFKSKDKGKFYAVPIYTYDFAIGKLPNKAIVQGKKNGIIKDWLEMDENYEFCFSLFKNDCIKIQTKEMQEAVLAIYKSTNSAKATIELEHLSKYALKNEDEEKMFTDTDKEKNKTMTRESCGIQGLKVFQKVKLSVLGEVLEHKPRNRQNIALKTTPKHV

SEQ ID NO: 120 - protein, 1377 aa, Streptococcus pasteurianus
MTKKNYSIGLDIGTNSVGWAVITDDYKVPAKKMKVLGNTDKKYIKKNLLGALLFDSGETAEATRLKRTARRRYTRRKNRLRYLQEIFAEEMTKVDESFFYRLDESFLTTDEKDFERHPIFGNKADEIKYHQEFPTIYHLRKHLADSSEKADLRLVYLALAHMIKFRGHFLIEGELNAENTDVQKIFADFVGVYDRTFDDSHLSEITVDAASILTEKISKSRRLENLIKYYPTEKKNTLFGNLIALALGLQPNFKMNFKLSEDAKLQFSKDSYNEDLEELLGKIGDDYADLFTSAKNLYDAILLSGILTVDDNSTKAPLSASMIKRYAEHHEDLEKLKEFIKANKSELYHDIFKDETKNGYAGYIENGVKQDEFYKYLKNTLSKIAGSDYFLDKIEREDFLRKQRTFDNGSIPHQIHLQEMHAILRRQGDYYPFLKENQDRIEKILTFRIPYYVGPLARKDSRFSWAEYHSDEKITPWNFDKVIDKEKSAEKFITRMTLNDLYLPEEKVLPKHSHVYETYAVYNELTKIKYVNEQGKDSFFDSNMKQEIFDHVFKENRKVTKEKLLNYLNKEFPEYRIKDLIGLDKENKSFNASLGTYHDLKKILDKAFLDDKVNEEVIEDIIKTLTLFEDKDMIHERLQKYSDIFTADQLKKLERRHYTGWGRLSYKLINGIRNKENNKTILDYLIDDGSANRNFMQLINDDTLPFKQIIQKSQVVGDVDDIEAVVHDLPGSPAIKKGILQSVKIVDELVKVMGDNPDNIVIEMARENQTTNRGRSQSQQRLKKLQNSLKELGSNILNEEKPSYIEDKVENSHLQNDQLFLYYIQNGKDMYTGDELDIDHLSDYDIDHIIPQAFIKDDSIDNRVLTSSAKNRGKSDDVPSLDIVRARKAEWVRLYKSGLISKRKFDNLTKAERGGLTEADKAGFIKRQLVETRQITKHVAQILDARFNTESDENDKVIRDVKVITLKSNLVSQFRKDFEFYKVREINDYHHAHDAYLNAVVGTALLKKYPKLASEFVYGEYKKYDVHKLIAKSSDDHSEMGKATAKYFFYSNLMNFFKRVIRYSNGKVIVRPVVEYSKDTEDIAWDKKSNFRTICKVLSYPQVNIVKKVETQTGGFSKESILPKGDSDKLIPRKTKKAYWDTKKYGGFDSPTVAYSVFVVADVEKGKAKKLKTVKELVGISIMERSFFEENPVEFLENKGYHNIREDKLIKLPKYSLFEFEGGKRRLLASASELQKGNEMVIPGHLVKLLYHAQRINSFNSTKYLDYVSAHKKEFEKVLSCVEDFANLYVDVEKNLSKIRAVADSMDNFSIEEISNSFINLLTLTALGAPADFNFLGEKIPRKRYTSTKECLNATLIHQSITGLYETRIDLSKIGEE

SEQ ID NO: 121 - protein, 1130 aa, Streptococcus pasteurianus
MTNGKILGLDIGIASVGVGIIEAKTGKVVHANSRLFSAANAENNAERRGFRGSRRLNRRKKHRVKRVRDLFEKYGIVTDFRNLNLNPYELRVKGLTEQLKNEELFAALRTISKRRGISYLDDAEDDSTGSTDYAKSIDENRRLLKNKTPGQIQLERLEKYGQLRGNFTVYDENGEAHRLINVFSTSDYEKEARKILETQADYNKKITAEFIDDYVEILTQKRKYYHGPGNEKSRTDYGRFRTDGTTLENIFGILIGKCNFYPDEYRASKASYTAQEYNFLNDLNNLKVSTETGKLSTEQKESLVEFAKNTATLGPAKLLKEIAKILDCKVDEIKGYREDDKGKPDLHTFEPYRKLKFNLESINIDDLSREVIDKLADILTLNTEREGIEDAIKRNLPNQFTEEQISEIIKVRKSQSTAFNKGWHSFSAKLMNELIPELYATSDEQMTILTRLEKFKVNKKSSKNTKTIDEKEVTDEIYNPVVAKSVRQTIKIINAAVKKYGDFDKIVIEMPRDKNADDEKKFIDKRNKENKKEKDDALKRAAYLYNSSDKLPDEVFHGNKQLETKIRLWYQQGERCLYSGKPISIQELVHNSNNFEIDHILPLSLSFDDSLANKVLVYAWTNQEKGQKTPYQVIDSMDAAWSFREMKDYVLKQKGLGKKKRDYLLTTENIDKIEVKKKFIERNLVDTRYASRVVLNSLQSALRELGKDTKVSVVRGQFTSQLRRKWKIDKSRETYHHHAVDALIIAASSQLKLWEKQDNPMFVDYGKNQVVDKQTGEILSVSDDEYKELVFQPPYQGFVNTISSKGFEDEILFSYQVDSKYNRKVSDATIYSTRKAKIGKDKKEETYVLGKIKDIYSQNGFDTFIKKYNKDKTQFLMYQKDSLTWENVIEVILRDYPTTKKSEDGKNDVKCNPFEEYRRENGLICKYSKKGKGTPIKSLKYYDKKLGNCIDITPEESRNKVILQSINPWRADVYFNPETLKYELMGLKYSDLSFEKGTGNYHISQEKYDAIKEKEGIGKKSEFKFTLYRNDLILIKDIASGEQEIYRFLSRTMPNVNHYVELKPYDKEKFDNVQELVEALGEADKVGRCIKGLNKPNISIYKVRTDVLGNKYFVKKKGDKPKLDFKNNKK

SEQ ID NO: 122-149 - skipped (28 entries)

SEQ ID NO: 150 - DNA, 36 bp, synthetic construct
  misc_feature 1..36: note = Synthetic construct
  source 1..36: mol_type = other DNA
gttttagtactctgtaattttaggtatgaggtagac

SEQ ID NO: 151 - RNA, 36 nt, synthetic construct
  misc_feature 1..36: note = Synthetic construct
  source 1..36: mol_type = other RNA
gttttagtactctgtaattttaggtatgaggtagac

SEQ ID NO: 152 - DNA, 14 bp, synthetic construct
  misc_feature 1..14: note = Synthetic construct
  source 1..14: mol_type = other DNA
gttttagtactctg

SEQ ID NO: 153 - RNA, 14 nt, synthetic construct
  misc_feature 1..14: note = Synthetic construct
  source 1..14: mol_type = other RNA
gttttagtactctg

SEQ ID NO: 154 - DNA, 13 bp, synthetic construct
  misc_feature 1..13: note = Synthetic construct
  source 1..13: mol_type = other DNA
gttttagtactct

SEQ ID NO: 155 - RNA, 13 nt, synthetic construct
  misc_feature 1..13: note = Synthetic construct
  source 1..13: mol_type = other RNA
gttttagtactct

SEQ ID NO: 156-161 - skipped (6 entries)

SEQ ID NO: 162 - DNA, 85 bp, synthetic construct
  misc_feature 1..85: note = Synthetic construct
  source 1..85: mol_type = other DNA
attgtacttatacctaaaattacagaatctactaaaacaaggcaaaatgccgtgtttatctcgtcaacttgttggcgagattttt

SEQ ID NO: 163 - RNA, 85 nt, synthetic construct
  misc_feature 1..85: note = Synthetic construct
  source 1..85: mol_type = other RNA
attgtacttatacctaaaattacagaatctactaaaacaaggcaaaatgccgtgtttatctcgtcaacttgttggcgagattttt

SEQ ID NO: 164 - DNA, 64 bp, synthetic construct
  misc_feature 1..64: note = Synthetic construct
  source 1..64: mol_type = other DNA
acagaatctactaaaacaaggcaaaatgccgtgtttatctcgtcaacttgttggcgagattttt

SEQ ID NO: 165 - RNA, 64 nt, synthetic construct
  misc_feature 1..64: note = Synthetic construct
  source 1..64: mol_type = other RNA
acagaatctactaaaacaaggcaaaatgccgtgtttatctcgtcaacttgttggcgagattttt

SEQ ID NO: 166 - DNA, 64 bp, synthetic construct; identical to SEQ ID NO: 164
  misc_feature 1..64: note = Synthetic construct
  source 1..64: mol_type = other DNA

SEQ ID NO: 167 - DNA, 63 bp, synthetic construct
  misc_feature 1..63: note = Synthetic construct
  source 1..63: mol_type = other DNA
acagaatctactaaaacaaggcaaaatgccgtgtttatctcgtcaacttgttggcgagatttt

SEQ ID NO: 168 - DNA, 62 bp, synthetic construct
  misc_feature 1..62: note = Synthetic construct
  source 1..62: mol_type = other DNA
acagaatctactaaaacaaggcaaaatgccgtgtttatctcgtcaacttgttggcgagattt

SEQ ID NO: 169 - DNA, 61 bp, synthetic construct
  misc_feature 1..61: note = Synthetic construct
  source 1..61: mol_type = other DNA
acagaatctactaaaacaaggcaaaatgccgtgtttatctcgtcaacttgttggcgagatt

SEQ ID NO: 170 - DNA, 60 bp, synthetic construct
  misc_feature 1..60: note = Synthetic construct
  source 1..60: mol_type = other DNA
acagaatctactaaaacaaggcaaaatgccgtgtttatctcgtcaacttgttggcgagat

SEQ ID NO: 171 - DNA, 63 bp, synthetic construct
  misc_feature 1..63: note = Synthetic construct
  source 1..63: mol_type = other DNA
cagaatctactaaaacaaggcaaaatgccgtgtttatctcgtcaacttgttggcgagattttt

SEQ ID NO: 172 - RNA, 63 nt, synthetic construct
  misc_feature 1..63: note = Synthetic construct
  source 1..63: mol_type = other RNA
cagaatctactaaaacaaggcaaaatgccgtgtttatctcgtcaacttgttggcgagattttt

SEQ ID NO: 173 - DNA, 62 bp, synthetic construct
  misc_feature 1..62: note = Synthetic construct
  source 1..62: mol_type = other DNA
cagaatctactaaaacaaggcaaaatgccgtgtttatctcgtcaacttgttggcgagatttt

SEQ ID NO: 174 - DNA, 61 bp, synthetic construct
  misc_feature 1..61: note = Synthetic construct
  source 1..61: mol_type = other DNA
cagaatctactaaaacaaggcaaaatgccgtgtttatctcgtcaacttgttggcgagattt

SEQ ID NO: 175 - DNA, 60 bp, synthetic construct
  misc_feature 1..60: note = Synthetic construct
  source 1..60: mol_type = other DNA
cagaatctactaaaacaaggcaaaatgccgtgtttatctcgtcaacttgttggcgagatt

SEQ ID NO: 176 - DNA, 59 bp, synthetic construct
  misc_feature 1..59: note = Synthetic construct
  source 1..59: mol_type = other DNA
cagaatctactaaaacaaggcaaaatgccgtgtttatctcgtcaacttgttggcgagat

SEQ ID NO: 177 - DNA, 30 bp, synthetic construct
  misc_feature 1..30: note = Synthetic construct
  source 1..30: mol_type = other DNA
cagaatctactaaaacaaggcaaaatgccg

SEQ ID NO: 178 - DNA, 29 bp, synthetic construct
  misc_feature 1..29: note = Synthetic construct
  source 1..29: mol_type = other DNA
cagaatctactaaaacaaggcaaaatgcc

SEQ ID NO: 179 - RNA, 35 nt, synthetic construct
  misc_feature 1..35: note = Synthetic construct
  source 1..35: mol_type = other RNA
gttttagtccctttttaaatttctttatggtaaat

SEQ ID NO: 180 - DNA, 35 bp, synthetic construct
  misc_feature 1..35: note = Synthetic construct
  source 1..35: mol_type = other DNA
gttttagtccctttttaaatttctttatggtaaat

SEQ ID NO: 181 - DNA, 13 bp, synthetic construct
  misc_feature 1..13: note = Synthetic construct
  source 1..13: mol_type = other DNA
gttttagtccctt

SEQ ID NO: 182 - RNA, 13 nt, synthetic construct
  misc_feature 1..13: note = Synthetic construct
  source 1..13: mol_type = other RNA
gttttagtccctt

SEQ ID NO: 183 - DNA, 12 bp, synthetic construct
  misc_feature 1..12: note = Synthetic construct
  source 1..12: mol_type = other DNA
gttttagtccct

SEQ ID NO: 184 - RNA, 12 nt, synthetic construct
  misc_feature 1..12: note = Synthetic construct
  source 1..12: mol_type = other RNA
gttttagtccct

SEQ ID NO: 185 - DNA, 11 bp, synthetic construct
  misc_feature 1..11: note = Synthetic construct
  source 1..11: mol_type = other DNA
gttttagtccc

SEQ ID NO: 186 - RNA, 11 nt, synthetic construct
  misc_feature 1..11: note = Synthetic construct
  source 1..11: mol_type = other RNA
gttttagtccc

SEQ ID NO: 187-190 - skipped (4 entries)

SEQ ID NO: 191 - DNA, 12 bp, synthetic construct
  misc_feature 1..12: note = Synthetic construct
  source 1..12: mol_type = other DNA
tgtggaaatata

SEQ ID NO: 192 - DNA, 74 bp, synthetic construct
  misc_feature 1..74: note = Synthetic construct
  source 1..74: mol_type = other DNA
aagaaatttaaaaagggactaaaataaagagtttgcgggactctgcggggttacaatcccctaaaaccgctttt

SEQ ID NO: 193 - RNA, 74 nt, synthetic construct
  misc_feature 1..74: note = Synthetic construct
  source 1..74: mol_type = other RNA
aagaaatttaaaaagggactaaaataaagagtttgcgggactctgcggggttacaatcccctaaaaccgctttt

SEQ ID NO: 194 - DNA, 64 bp, synthetic construct
  misc_feature 1..64: note = Synthetic construct
  source 1..64: mol_type = other DNA
agggactaaaataaagagtttgcgggactctgcggggttacaatcccctaaaaccgcttttttt

SEQ ID NO: 195 - RNA, 64 nt, synthetic construct
  misc_feature 1..64: note = Synthetic construct
  source 1..64: mol_type = other RNA
agggactaaaataaagagtttgcgggactctgcggggttacaatcccctaaaaccgcttttttt

SEQ ID NO: 196 - DNA, 63 bp, synthetic construct
  misc_feature 1..63: note = Synthetic construct
  source 1..63: mol_type = other DNA
agggactaaaataaagagtttgcgggactctgcggggttacaatcccctaaaaccgctttttt

SEQ ID NO: 197 - DNA, 62 bp, synthetic construct
  misc_feature 1..62: note = Synthetic construct
  source 1..62: mol_type = other DNA
agggactaaaataaagagtttgcgggactctgcggggttacaatcccctaaaaccgcttttt

SEQ ID NO: 198 - DNA, 61 bp, synthetic construct
  misc_feature 1..61: note = Synthetic construct
  source 1..61: mol_type = other DNA
agggactaaaataaagagtttgcgggactctgcggggttacaatcccctaaaaccgctttt

SEQ ID NO: 199 - DNA, 60 bp, synthetic construct
  misc_feature 1..60: note = Synthetic construct
  source 1..60: mol_type = other DNA
agggactaaaataaagagtttgcgggactctgcggggttacaatcccctaaaaccgcttt

SEQ ID NO: 200 - DNA, 59 bp, synthetic construct
  misc_feature 1..59: note = Synthetic construct
  source 1..59: mol_type = other DNA
agggactaaaataaagagtttgcgggactctgcggggttacaatcccctaaaaccgctt

SEQ ID NO: 201 - DNA, 58 bp, synthetic construct
  misc_feature 1..58: note = Synthetic construct
  source 1..58: mol_type = other DNA
agggactaaaataaagagtttgcgggactctgcggggttacaatcccctaaaaccgct

SEQ ID NO: 202 - DNA, 57 bp, synthetic construct
  misc_feature 1..57: note = Synthetic construct
  source 1..57: mol_type = other DNA
agggactaaaataaagagtttgcgggactctgcggggttacaatcccctaaaaccgc

SEQ ID NO: 203 - DNA, 63 bp, synthetic construct
  misc_feature 1..63: note = Synthetic construct
  source 1..63: mol_type = other DNA
gggactaaaataaagagtttgcgggactctgcggggttacaatcccctaaaaccgcttttttt

SEQ ID NO: 204 - RNA, 63 nt, synthetic construct
  misc_feature 1..63: note = Synthetic construct
  source 1..63: mol_type = other RNA
gggactaaaataaagagtttgcgggactctgcggggttacaatcccctaaaaccgcttttttt

SEQ ID NO: 205 - DNA, 62 bp, synthetic construct
  misc_feature 1..62: note = Synthetic construct
  source 1..62: mol_type = other DNA
gggactaaaataaagagtttgcgggactctgcggggttacaatcccctaaaaccgctttttt

SEQ ID NO: 206 - DNA, 61 bp, synthetic construct
  misc_feature 1..61: note = Synthetic construct
  source 1..61: mol_type = other DNA
gggactaaaataaagagtttgcgggactctgcggggttacaatcccctaaaaccgcttttt

SEQ ID NO: 207 - DNA, 60 bp, synthetic construct
  misc_feature 1..60: note = Synthetic construct
  source 1..60: mol_type = other DNA
gggactaaaataaagagtttgcgggactctgcggggttacaatcccctaaaaccgctttt

SEQ ID NO: 208 - DNA, 59 bp, synthetic construct
  misc_feature 1..59: note = Synthetic construct
  source 1..59: mol_type = other DNA
gggactaaaataaagagtttgcgggactctgcggggttacaatcccctaaaaccgcttt

SEQ ID NO: 209 - DNA, 58 bp, synthetic construct
  misc_feature 1..58: note = Synthetic construct
  source 1..58: mol_type = other DNA
gggactaaaataaagagtttgcgggactctgcggggttacaatcccctaaaaccgctt

SEQ ID NO: 210 - DNA, 57 bp, synthetic construct
  misc_feature 1..57: note = Synthetic construct
  source 1..57: mol_type = other DNA
gggactaaaataaagagtttgcgggactctgcggggttacaatcccctaaaaccgct

SEQ ID NO: 211 - DNA, 56 bp, synthetic construct
  misc_feature 1..56: note = Synthetic construct
  source 1..56: mol_type = other DNA
gggactaaaataaagagtttgcgggactctgcggggttacaatcccctaaaaccgc

SEQ ID NO: 212 - DNA, 30 bp, synthetic construct
  misc_feature 1..30: note = Synthetic construct
  source 1..30: mol_type = other DNA
gggactaaaataaagagtttgcgggactct

SEQ ID NO: 213 - DNA, 36 bp, synthetic construct
  misc_feature 1..36: note = Synthetic construct
  source 1..36: mol_type = other DNA
gtttttgtactctcaagatttaagtaactgtacaac

SEQ ID NO: 214 - DNA, 36 bp, synthetic construct
  misc_feature 1..36: note = Synthetic construct
  source 1..36: mol_type = other DNA
gttttagagctgtgttgtttcgaatggttccaaaac

SEQ ID NO: 215 - DNA, 36 bp, synthetic construct
  misc_feature 1..36: note = Synthetic construct
  source 1..36: mol_type = other DNA
ggtttgaaaccattcgaaacaacacagcgagttaaa

SEQ ID NO: 216 - DNA, 36 bp, synthetic construct
  misc_feature 1..36: note = Synthetic construct
  source 1..36: mol_type = other DNA
cttacacagttacttaaatcttgcagaagctacaaa

SEQ ID NO: 217 - DNA, 27 bp, synthetic construct
  misc_feature 1..27: note = Synthetic construct
  source 1..27: mol_type = other DNA
gtttttgtactctcaagatttaagtaa

SEQ ID NO: 218 - DNA, 18 bp, synthetic construct
  misc_feature 1..18: note = Synthetic construct
  source 1..18: mol_type = other DNA
gtttttgtactctcaaga

SEQ ID NO: 219 - DNA, 17 bp, synthetic construct
  misc_feature 1..17: note = Synthetic construct
  source 1..17: mol_type = other DNA
gtttttgtactctcaag

SEQ ID NO: 220 - DNA, 27 bp, synthetic construct
  misc_feature 1..27: note = Synthetic construct
  source 1..27: mol_type = other DNA
gttttagagctgtgttgtttcgaatgg

SEQ ID NO: 221 - DNA, 17 bp, synthetic construct
  misc_feature 1..17: note = Synthetic construct
  source 1..17: mol_type = other DNA
gttttagagctgtgttg

SEQ ID NO: 222 - DNA, 17 bp, synthetic construct
  misc_feature 1..17: note = Synthetic construct
  source 1..17: mol_type = other DNA
ggtttgaaaccattcga

SEQ ID NO: 223 - DNA, 16 bp, synthetic construct
  misc_feature 1..16: note = Synthetic construct
  source 1..16: mol_type = other DNA
ggtttgaaaccattcg

SEQ ID NO: 224 - DNA, 17 bp, synthetic construct
  misc_feature 1..17: note = Synthetic construct
  source 1..17: mol_type = other DNA
cttacacagttacttaa

SEQ ID NO: 225 - DNA, 15 bp, synthetic construct
  misc_feature 1..15: note = Synthetic construct
  source 1..15: mol_type = other DNA
cttacacagttactt

SEQ ID NO: 226-231 - skipped (6 entries)

SEQ ID NO: 232 - DNA, 90 bp, synthetic construct
  misc_feature 1..90: note = Synthetic construct
  source 1..90: mol_type = other DNA
ttacttaaatcttgcagaagctacaaagataaggcttcatgccgaaatcaacaccctgtcattttatggcagggtgttttcgttatttaa

SEQ ID NO: 233 - DNA, 104 bp, synthetic construct
  misc_feature 1..104: note = Synthetic construct
  source 1..104: mol_type = other DNA
gtaaggggcgccttacacagttacttaaatcttgcagaagctacaaagataaggcttcatgccgaaatcaacaccctgtcattttatggcagggtgttttcgtt

SEQ ID NO: 234 - DNA, 93 bp, synthetic construct
  misc_feature 1..93: note = Synthetic construct
  source 1..93: mol_type = other DNA
cttacacagttacttaaatcttgcagaagctacaaagataaggcttcatgccgaaatcaacaccctgtcattttatggcagggtgttttcgtt

SEQ ID NO: 235 - DNA, 36 bp, synthetic construct; identical to SEQ ID NO: 216
  misc_feature 1..36: note = Synthetic construct
  source 1..36: mol_type = other DNA

SEQ ID NO: 236 - DNA, 96 bp, synthetic construct
  misc_feature 1..96: note = Synthetic construct
  source 1..96: mol_type = other DNA
ttgtggtttgaaaccattcgaaacaacacagcgagttaaaataaggcttagtccgtactcaacttgaaaaggtggcaccgattcggtgtttttttt

SEQ ID NO: 237 - DNA, 92 bp, synthetic construct
  misc_feature 1..92: note = Synthetic construct
  source 1..92: mol_type = other DNA
ggtttgaaaccattcgaaacaacacagcgagttaaaataaggcttagtccgtactcaacttgaaaaggtggcaccgattcggtgtttttttt

SEQ ID NO: 238 - DNA, 36 bp, synthetic construct; identical to SEQ ID NO: 215
  misc_feature 1..36: note = Synthetic construct
  source 1..36: mol_type = other DNA

SEQ ID NO: 239 - DNA, 37 bp, synthetic construct
  misc_feature 1..37: note = Synthetic construct
  source 1..37: mol_type = other DNA
gcaacactttatagcaaatccgcttagcctgtgaaac

SEQ ID NO: 240 - DNA, 36 bp, synthetic construct
  misc_feature 1..36: note = Synthetic construct
  source 1..36: mol_type = other DNA
attatagcgaggaatggctgagtaggcggctataac

SEQ ID NO: 241 - DNA, 24 bp, synthetic construct
  misc_feature 1..24: note = Synthetic construct
  source 1..24: mol_type = other DNA
gcaacactttatagcaaatccgct

SEQ ID NO: 242 - DNA, 15 bp, synthetic construct
  misc_feature 1..15: note = Synthetic construct
  source 1..15: mol_type = other DNA
gcaacactttatagc

SEQ ID NO: 243 - DNA, 11 bp, synthetic construct
  misc_feature 1..11: note = Synthetic construct
  source 1..11: mol_type = other DNA
gcaacacttta

SEQ ID NO: 244 - DNA, 37 bp, synthetic construct
  misc_feature 1..37: note = Synthetic construct
  source 1..37: mol_type = other DNA
tttcaaggcatcgaacggatttgctataaagtgttgc

SEQ ID NO: 245 - DNA, 37 bp, synthetic construct
  misc_feature 1..37: note = Synthetic construct
  source 1..37: mol_type = other DNA
tttgttaaagctggatgggattattatagagtgttgc

SEQ ID NO: 246 - DNA, 36 bp, synthetic construct
  misc_feature 1..36: note = Synthetic construct
  source 1..36: mol_type = other DNA
atagccgctgcctactcagccatttagcgcagcgac

SEQ ID NO: 247 - DNA, 13 bp, synthetic construct
  misc_feature 1..13: note = Synthetic construct
  source 1..13: mol_type = other DNA
tatagagtgttgc

SEQ ID NO: 248 - RNA, 11 nt, synthetic construct
  modified_base 1: mod_base = OTHER; note = thymine
  modified_base 8..9: mod_base = OTHER; note = thymine
  misc_feature 1..11: note = Synthetic construct
  source 1..11: mol_type = other RNA
tagagtgttgc

SEQ ID NO: 249 - DNA, 13 bp, synthetic construct
  misc_feature 1..13: note = Synthetic construct
  source 1..13: mol_type = other DNA
tataaagtgttgc

SEQ ID NO: 250 - DNA, 11 bp, synthetic construct
  misc_feature 1..11: note = Synthetic construct
  source 1..11: mol_type = other DNA
taaagtgttgc

SEQ ID NO: 251 - DNA, 36 bp, synthetic construct
  misc_feature 1..36: note = Synthetic construct
  source 1..36: mol_type = other DNA
gttttagtactctgtaattttaggtataagtgatac

SEQ ID NO: 252 - DNA, 35 bp, synthetic construct
  misc_feature 1..35: note = Synthetic construct
  source 1..35: mol_type = other DNA
ttttagtactctgtaattttaggtataagtgatac

SEQ ID NO: 253 - DNA, 21 bp, synthetic construct
  misc_feature 1..21: note = Synthetic construct
  source 1..21: mol_type = other DNA
tctgtaattttaggtataagt

SEQ ID NO: 254 - DNA, 36 bp, synthetic construct
  misc_feature 1..36: note = Synthetic construct
  source 1..36: mol_type = other DNA
cttgtacttatacctaaaattacagaatctactgaa

SEQ ID NO: 255 - DNA, 21 bp, synthetic construct
  misc_feature 1..21: note = Synthetic construct
  source 1..21: mol_type = other DNA
acttatacctaaaattacaga

SEQ ID NO: 256 - DNA, 36 bp, synthetic construct
  misc_feature 1..36: note = Synthetic construct
  source 1..36: mol_type = other DNA
gttttagcactatgtttatttagaaagaggtaaaac

SEQ ID NO: 257 - DNA, 28 bp, synthetic construct
  misc_feature 1..28: note = Synthetic construct
  source 1..28: mol_type = other DNA
actatgtttatttagaaagaggtaaaac

SEQ ID NO: 258 - DNA, 36 bp, synthetic construct
  misc_feature 1..36: note = Synthetic construct
  source 1..36: mol_type = other DNA
gttttacttctttctaaataaacatagttaagttaa

SEQ ID NO: 259 - DNA, 28 bp, synthetic construct
  misc_feature 1..28: note = Synthetic construct
  source 1..28: mol_type = other DNA
gttttacttctttctaaataaacatagt

SEQ ID NO: 260 - DNA, 36 bp, synthetic construct
  misc_feature 1..36: note = Synthetic construct
  source 1..36: mol_type = other DNA
attttagcataaacatatttatgaagtggctaaaac

SEQ ID NO: 261 - DNA, 36 bp, synthetic construct
  misc_feature 1..36: note = Synthetic construct
  source 1..36: mol_type = other DNA
gtatttgtcaataaatatactttataatggcaagat

SEQ ID NO: 262 - DNA, 27 bp, synthetic construct
  misc_feature 1..27: note = Synthetic construct
  source 1..27: mol_type = other DNA
gtttttgtactctcaagatttaagtaa

SEQ ID NO: 263 - DNA, 18 bp, synthetic construct
  misc_feature 1..18: note = Synthetic construct
  source 1..18: mol_type = other DNA
gtttttgtactctcaaga

SEQ ID NO: 264 - DNA, 17 bp, synthetic construct
  misc_feature 1..17: note = Synthetic construct
  source 1..17: mol_type = other DNA
gtttttgtactctcaag

SEQ ID NO: 265-269 - skipped (5 entries)

SEQ ID NO: 270 - DNA, 81 bp, synthetic construct
  misc_feature 1..81: note = Synthetic construct
  source 1..81: mol_type = other DNA
ttacttaaatcttgctgagcctacaaagataaggctttatgccgaattcaagcaccccatgttttgacatgaggtgctttt

SEQ ID NO: 271 - DNA, 72 bp, synthetic construct
  misc_feature 1..72: note = Synthetic construct
  source 1..72: mol_type = other DNA
tcttgctgagcctacaaagataaggctttatgccgaattcaagcaccccatgttttgacatgaggtgctttt

SEQ ID NO: 272 - DNA, 71 bp, synthetic construct
  misc_feature 1..71: note = Synthetic construct
  source 1..71: mol_type = other DNA
cttgctgagcctacaaagataaggctttatgccgaattcaagcaccccatgttttgacatgaggtgctttt

SEQ ID NO: 273 - DNA, 34 bp, synthetic construct
  misc_feature 1..34: note = Synthetic construct
  source 1..34: mol_type = other DNA
tcttgctgagcctacaaagataaggctttatgcc

SEQ ID NO: 274 - RNA, 83 nt, synthetic construct
  misc_feature 1..83: note = Synthetic construct
  variation 1: note = any nucleotide or nucleic acid
  variation 2: note = any nucleotide or nucleic acid
  source 1..83: mol_type = other RNA
nngttttagtactctggaaacagaatctactaaaacaaggcaaaatgccgtgtttatctcgtcaacttgttggcgagattttt

SEQ ID NO: 275 - DNA, 83 bp, synthetic construct
  misc_feature 1..83: note = Synthetic construct
  variation 1: note = any nucleotide or nucleic acid
  variation 2: note = any nucleotide or nucleic acid
  source 1..83: mol_type = other DNA
nngttttagtactctggaaacagaatctactaaaacaaggcaaaatgccgtgtttatctcgtcaacttgttggcgagattttt

SEQ ID NO: 276 - RNA, 81 nt, synthetic construct
  misc_feature 1..81: note = Synthetic construct
  variation 1: note = any nucleotide or nucleic acid
  variation 2: note = any nucleotide or nucleic acid
  source 1..81: mol_type = other RNA
nngttttagtactctggaaacagaatctactaaaacaaggcaaaatgccgtgtttatctcgtcaacttgttggcgagattt

SEQ ID NO: 277 - DNA, 81 bp, synthetic construct
  misc_feature 1..81: note = Synthetic construct
  variation 1: note = any nucleotide or nucleic acid
  variation 2: note = any nucleotide or nucleic acid
  source 1..81: mol_type = other DNA
nngttttagtactctggaaacagaatctactaaaacaaggcaaaatgccgtgtttatctcgtcaacttgttggcgagattt

SEQ ID NO: 278 - DNA, 75 bp, synthetic construct
  misc_feature 1..75: note = Synthetic construct
  variation 1: note = any nucleotide or nucleic acid
  variation 2: note = any nucleotide or nucleic acid
  source 1..75: mol_type = other DNA
nngttttagtccctgaaaagggactaaaataaagagtttgcgggactctgcggggttacaatcccctaaaaccgc

SEQ ID NO: 279 - DNA, 75 bp, synthetic construct; identical to SEQ ID NO: 278
  misc_feature 1..75: note = Synthetic construct
  variation 1: note = any nucleotide or nucleic acid
  variation 2: note = any nucleotide or nucleic acid
  source 1..75: mol_type = other DNA

SEQ ID NO: 280 - RNA, 75 nt, synthetic construct
  misc_feature 1..75: note = Synthetic construct
  variation 1: note = any nucleotide or nucleic acid
  variation 2: note = any nucleotide or nucleic acid
  source 1..75: mol_type = other RNA
nngttttagtccctgaaaagggactaaaataaagagtttgcgggactctgcggggttacaatcccctaaaaccgc

SEQ ID NO: 281 - DNA, 81 bp, synthetic construct
  misc_feature 1..81: note = Synthetic construct
  variation 1: note = any nucleotide or nucleic acid
  variation 2: note = any nucleotide or nucleic acid
  source 1..81: mol_type = other DNA
nngttttagtccctgaaaagggactaaaataaagagtttgcgggactctgcggggttacaatcccctaaaaccgctttttt

SEQ ID NO: 282 - DNA, 82 bp, synthetic construct
  misc_feature 1..82: note = Synthetic construct
  variation 1: note = any nucleotide or nucleic acid
  variation 2: note = any nucleotide or nucleic acid
  source 1..82: mol_type = other DNA
nngttttagtccctgaaaagggactaaaataaagagtttgcgggactctgcggggttacaatcccctaaaaccgcttttttt

SEQ ID NO: 283 - DNA, 80 bp, synthetic construct
  misc_feature 1..80: note = Synthetic construct
  variation 1: note = any nucleotide or nucleic acid
  variation 2: note = any nucleotide or nucleic acid
  source 1..80: mol_type = other DNA
nngttttagtccctgaagggactaaaataaaagagtttgcgggactctgcggggttacaatcccctaaaaccgctttttt

SEQ ID NO: 284 - DNA, 90 bp, synthetic construct
  misc_feature 1..90: note = Synthetic construct
  variation 1: note = any nucleotide or nucleic acid
  variation 2: note = any nucleotide or nucleic acid
  source 1..90: mol_type = other DNA
nngttttagtcccttgtggaaatataagggactaaaataaagagtttgcgggactctgcggggttacaatcccctaaaaccgcttttttt

SEQ ID NO: 285 - DNA, 86 bp, synthetic construct
  misc_feature 1..86: note = Synthetic construct
  variation 1: note = any nucleotide or nucleic acid
  variation 2: note = any nucleotide or nucleic acid
  source 1..86: mol_type = other DNA
nngttttagtccctatattcaaagggactaaaataaagagtttgcgggactctgcggggttacaatcccctaaaaccgcttttttt

SEQ ID NO: 286 - DNA, 96 bp, synthetic construct
  misc_feature 1..96: note = Synthetic construct
  variation 1: note = any nucleotide or nucleic acid
  variation 2: note = any nucleotide or nucleic acid
  source 1..96: mol_type = other DNA
nngtttttgtactctcaagattaatcttgctgagcctacaaagataaggctttatgccgaattcaagcaccccatgttttgacatgaggtgctttt

SEQ ID NO: 287 - DNA, 92 bp, synthetic construct
  misc_feature 1..92: note = Synthetic construct
  variation 1: note = any nucleotide or nucleic acid
  variation 2: note = any nucleotide or nucleic acid
  source 1..92: mol_type = other DNA
nngtttttgtactctcaagattaatcttgctgagcctacaaagataaggctttatgccgaattcaagcaccccatgttttgacatgaggtgc

SEQ ID NO: 288 - DNA, 95 bp, synthetic construct
  misc_feature 1..95: note = Synthetic construct
  variation 1: note = any nucleotide or nucleic acid
  variation 2: note = any nucleotide or nucleic acid
  source 1..95: mol_type = other DNA
nngtttttgtactctcaagataatcttgctgagcctacaaagataaggctttatgccgaattcaagcaccccatgttttgacatgaggtgctttt

SEQ ID NO: 289 - DNA, 91 bp, synthetic construct
  misc_feature 1..91: note = Synthetic construct
  variation 1: note = any nucleotide or nucleic acid
  variation 2: note = any nucleotide or nucleic acid
  source 1..91: mol_type = other DNA
nngtttttgtactctcaagataatcttgctgagcctacaaagataaggctttatgccgaattcaagcaccccatgttttgacatgaggtgc

SEQ ID NO: 290 - DNA, 93 bp, synthetic construct
  misc_feature 1..93: note = Synthetic construct
  variation 1: note = any nucleotide or nucleic acid
  variation 2: note = any nucleotide or nucleic acid
  source 1..93: mol_type = other DNA
nngtttttgtactctcaagaaacttgctgagcctacaaagataaggctttatgccgaattcaagcaccccatgttttgacatgaggtgctttt

SEQ ID NO: 291 - DNA, 89 bp, synthetic construct
  misc_feature 1..89: note = Synthetic construct
  variation 1: note = any nucleotide or nucleic acid
  variation 2: note = any nucleotide or nucleic acid
  source 1..89: mol_type = other DNA
nngtttttgtactctcaagaaacttgctgagcctacaaagataaggctttatgccgaattcaagcaccccatgttttgacatgaggtgc

SEQ ID NO: 292 - DNA, 93 bp, synthetic construct
  misc_feature 1..93: note = Synthetic construct
  variation 1: note = any nucleotide or nucleic acid
  variation 2: note = any nucleotide or nucleic acid
  source 1..93: mol_type = other DNA
nngtttttgtactctcaagaatcttgctgagcctacaaagataaggctttatgccgaattcaagcaccccatgttttgacatgaggtgctttt

SEQ ID NO: 293 - DNA, 89 bp, synthetic construct
  misc_feature 1..89: note = Synthetic construct
  variation 1: note = any nucleotide or nucleic acid
  variation 2: note = any nucleotide or nucleic acid
  source 1..89: mol_type = other DNA
nngtttttgtactctcaagaatcttgctgagcctacaaagataaggctttatgccgaattcaagcaccccatgttttgacatgaggtgc

SEQ ID NO: 294-299 - skipped (6 entries)

SEQ ID NO: 300 - RNA, 26 nt, synthetic construct
  misc_feature 1..26: note = Synthetic construct
  source 1..26: mol_type = other RNA
ggctgtaagcggatgccatatggttg

SEQ ID NO: 301 - RNA, 25 nt, synthetic construct
  misc_feature 1..25: note = Synthetic construct
  source 1..25: mol_type = other RNA
ggctgtaagcggatgccatatggtt

SEQ ID NO: 302 - RNA, 24 nt, synthetic construct
  misc_feature 1..24: note = Synthetic construct
  source 1..24: mol_type = other RNA
ggctgtaagcggatgccatatggt

SEQ ID NO: 303 - RNA, 23 nt, synthetic construct
  misc_feature 1..23: note = Synthetic construct
  source 1..23: mol_type = other RNA
ggctgtaagcggatgccatatgg

SEQ ID NO: 304 - RNA, 22 nt, synthetic construct
  misc_feature 1..22: note = Synthetic construct
  source 1..22: mol_type = other RNA
ggctgtaagcggatgccatatg

SEQ ID NO: 305 - RNA, 21 nt, synthetic construct
  misc_feature 1..21: note = Synthetic construct
  source 1..21: mol_type = other RNA
ggctgtaagcggatgccatat

SEQ ID NO: 306 - RNA, 20 nt, synthetic construct
  misc_feature 1..20: note = Synthetic construct
  source 1..20: mol_type = other RNA
ggctgtaagcggatgccata

SEQ ID NO: 307 - RNA, 47 nt, synthetic construct; identical to SEQ ID NO: 12
  misc_feature 1..47: note = Synthetic construct
  source 1..47: mol_type = other RNA

SEQ ID NO: 308 - RNA, 23 nt, synthetic construct
  misc_feature 1..23: note = Synthetic construct
  source 1..23: mol_type = other RNA
tataccgctttcagttttcattt

SEQ ID NO: 309 - RNA, 31 nt, synthetic construct
  misc_feature 1..31: note = Synthetic construct
  source 1..31: mol_type = other RNA
aaagtggcaacccagactgttggtggtgtag

SEQ ID NO: 310 - RNA, 38 nt, synthetic construct
  misc_feature 1..38: note = Synthetic construct
  source 1..38: mol_type = other RNA
ggcagcattcaaccatatggcatccgcttacagccaag

SEQ ID NO: 311 - RNA, 23 nt, synthetic construct
  misc_feature 1..23: note = Synthetic construct
  source 1..23: mol_type = other RNA
ccatatggcatccgcttacagca

SEQ ID NO: 312 - RNA, 23 nt, synthetic construct
  misc_feature 1..23: note = Synthetic construct
  source 1..23: mol_type = other RNA
ccatatggcatccgcttacagac

SEQ ID NO: 313 - RNA, 23 nt, synthetic construct
  misc_feature 1..23: note = Synthetic construct
  source 1..23: mol_type = other RNA
ccatatggcatccgcttacatcc

SEQ ID NO: 314 - RNA, 23 nt, synthetic construct
  misc_feature 1..23: note = Synthetic construct
  source 1..23: mol_type = other RNA
ccatatggcatccgcttaccgcc

SEQ ID NO: 315 - RNA, 23 nt, synthetic construct
  misc_feature 1..23: note = Synthetic construct
  source 1..23: mol_type = other RNA
ccatatggcatccgcttaaagcc

SEQ ID NO: 316 - RNA, 23 nt, synthetic construct
  misc_feature 1..23: note = Synthetic construct
  source 1..23: mol_type = other RNA
ccatatggcatccgcttccagcc

SEQ ID NO: 317 - RNA, 23 nt, synthetic construct
  misc_feature 1..23: note = Synthetic construct
  source 1..23: mol_type = other RNA
ccatatggcatccgctgacagcc

SEQ ID NO: 318 - RNA, 23 nt, synthetic construct
  misc_feature 1..23: note = Synthetic construct
  source 1..23: mol_type = other RNA
ccatatggcatccgcgtacagcc

SEQ ID NO: 319 - RNA, 23 nt, synthetic construct
  misc_feature 1..23: note = Synthetic construct
  source 1..23: mol_type = other RNA
ccatatggcatccgattacagcc

SEQ ID NO: 320 - RNA, 23 nt, synthetic construct
  misc_feature 1..23: note = Synthetic construct
  source 1..23: mol_type = other RNA
ccatatggcatcctcttacagcc

SEQ ID NO: 321 - RNA, 23 nt, synthetic construct
  misc_feature 1..23: note = Synthetic construct
  source 1..23: mol_type = other RNA
ccatatggcatcagcttacagcc

SEQ ID NO: 322 - RNA, 23 nt, synthetic construct
  misc_feature 1..23: note = Synthetic construct
  source 1..23: mol_type = other RNA
ccatatggcatacgcttacagcc

SEQ ID NO: 323 - RNA, 23 nt, synthetic construct
  misc_feature 1..23: note = Synthetic construct
  source 1..23: mol_type = other RNA
ccatatggcagccgcttacagcc

SEQ ID NO: 324 - RNA, 23 nt, synthetic construct
  misc_feature 1..23: note = Synthetic construct
  source 1..23: mol_type = other RNA
ccatatggcctccgcttacagcc

SEQ ID NO: 325 - RNA, 23 nt, synthetic construct
  misc_feature 1..23: note = Synthetic construct
  source 1..23: mol_type = other RNA
ccatatggaatccgcttacagcc

SEQ ID NO: 326 - RNA, 23 nt, synthetic construct
  misc_feature 1..23: note = Synthetic construct
  source 1..23: mol_type = other RNA
ccatatgtcatccgcttacagcc

SEQ ID NO: 327 - RNA, 22 nt, synthetic construct
  misc_feature 1..22: note = Synthetic construct
  source 1..22: mol_type = other RNA
ccatattcatccgcttacagcc

SEQ ID NO: 328 - RNA, 22 nt, synthetic construct
  misc_feature 1..22: note = Synthetic construct
  source 1..22: mol_type = other RNA
ccataggcatccgcttacagcc

SEQ ID NO: 329 - RNA, 22 nt, synthetic construct
  misc_feature 1..22: note = Synthetic construct
  source 1..22: mol_type = other RNA
ccatcggcatccgcttacagcc

SEQ ID NO: 330 - RNA, 23 nt, synthetic construct
  misc_feature 1..23: note = Synthetic construct
  source 1..23: mol_type = other RNA
ccagatggcatccgcttacagcc

SEQ ID NO: 331 - RNA, 23 nt, synthetic construct
  misc_feature 1..23: note = Synthetic construct
  source 1..23: mol_type = other RNA
ccctatggcatccgcttacagcc

SEQ ID NO: 332 - RNA, 23 nt, synthetic construct
  misc_feature 1..23: note = Synthetic construct
  source 1..23: mol_type = other RNA
caatatggcatccgcttacagcc

SEQ ID NO: 333 - RNA, 23 nt, synthetic construct
  misc_feature 1..23: note = Synthetic construct
  source 1..23: mol_type = other RNA
acatatggcatccgcttacagcc

SEQ ID NO: 334 - DNA, 20 bp, synthetic construct
  misc_feature 1..20: note = Synthetic construct
  source 1..20: mol_type = other DNA
tgggtggtaactagccaagc

SEQ ID NO: 335 - DNA, 20 bp, synthetic construct
  misc_feature 1..20: note = Synthetic construct
  source 1..20: mol_type = other DNA
gggtggtaactagccaagca

SEQ ID NO: 336 - DNA, 20 bp, synthetic construct
  misc_feature 1..20: note = Synthetic construct
  source 1..20: mol_type = other DNA
ggtggtaactagccaagcag

SEQ ID NO: 337 - DNA, 20 bp, synthetic construct
  misc_feature 1..20: note = Synthetic construct
  source 1..20: mol_type = other DNA
gtggtaactagccaagcagc

SEQ ID NO: 338 - DNA, 20 bp, synthetic construct
  misc_feature 1..20: note = Synthetic construct
  source 1..20: mol_type = other DNA
tggtaactagccaagcagct

SEQ ID NO: 339 - DNA, 20 bp, synthetic construct
  misc_feature 1..20: note = Synthetic construct
  source 1..20: mol_type = other DNA
ggtaactagccaagcagcta

SEQ ID NO: 340 - DNA, 20 bp, synthetic construct
  misc_feature 1..20: note = Synthetic construct
  source 1..20: mol_type = other DNA
gtaactagccaagcagctag

SEQ ID NO: 341 - DNA, 20 bp, synthetic construct
  misc_feature 1..20: note = Synthetic construct
  source 1..20: mol_type = other DNA
taactagccaagcagctagt

SEQ ID NO: 342 - DNA, 20 bp, synthetic construct
  misc_feature 1..20: note = Synthetic construct
  source 1..20: mol_type = other DNA
aactagccaagcagctagtt

SEQ ID NO: 343 - DNA, 20 bp, synthetic construct
  misc_feature 1..20: note = Synthetic construct
  source 1..20: mol_type = other DNA
actagccaagcagctagtta

SEQ ID NO: 344 - DNA, 20 bp, synthetic construct
  misc_feature 1..20: note = Synthetic construct
  source 1..20: mol_type = other DNA
ctagccaagcagctagttac

SEQ ID NO: 345 - DNA, 20 bp, synthetic construct
  misc_feature 1..20: note = Synthetic construct
  source 1..20: mol_type = other DNA
tagccaagcagctagttacc

SEQ ID NO: 346 - DNA, 20 bp, synthetic construct
  misc_feature 1..20: note = Synthetic construct
  source 1..20: mol_type = other DNA
agccaagcagctagttacca

SEQ ID NO: 347 - DNA, 20 bp, synthetic construct
  misc_feature 1..20: note = Synthetic construct
  source 1..20: mol_type = other DNA
gccaagcagctagttaccaa

SEQ ID NO: 348 - DNA, 20 bp, synthetic construct
  misc_feature 1..20: note = Synthetic construct
  source 1..20: mol_type = other DNA
ccaagcagctagttaccaaa

SEQ ID NO: 349 - DNA, 20 bp, synthetic construct
  misc_feature 1..20: note = Synthetic construct
  source 1..20: mol_type = other DNA
caagcagctagttaccaaat

SEQ ID NO: 350 - DNA, 20 bp, synthetic construct
  misc_feature 1..20: note = Synthetic construct
  source 1..20: mol_type = other DNA
aagcagctagttaccaaatc

SEQ ID NO: 351 - DNA, 20 bp, synthetic construct
  misc_feature 1..20: note = Synthetic construct
  source 1..20: mol_type = other DNA
agcagctagttaccaaatcg

SEQ ID NO: 352 - DNA, 20 bp, synthetic construct
  misc_feature 1..20: note = Synthetic construct
  source 1..20: mol_type = other DNA
gcagctagttaccaaatcgg

SEQ ID NO: 353 - DNA, 20 bp, synthetic construct
  misc_feature 1..20: note = Synthetic construct
  source 1..20: mol_type = other DNA
cagctagttaccaaatcggg

SEQ ID NO: 354 - DNA, 20 bp, synthetic construct
  misc_feature 1..20: note = Synthetic construct
  source 1..20: mol_type = other DNA
agctagttaccaaatcggga

SEQ ID NO: 355 - DNA, 20 bp, synthetic construct
  misc_feature 1..20: note = Synthetic construct
  source 1..20: mol_type = other DNA
gctagttaccaaatcgggag

SEQ ID NO: 356 - DNA, 20 bp, synthetic construct
  misc_feature 1..20: note = Synthetic construct
  source 1..20: mol_type = other DNA
ctagttaccaaatcgggaga

SEQ ID NO: 357 - DNA, 20 bp, synthetic construct
  misc_feature 1..20: note = Synthetic construct
  source 1..20: mol_type = other DNA
tagttaccaaatcgggagaa

SEQ ID NO: 358 - DNA, 20 bp, synthetic construct
  misc_feature 1..20: note = Synthetic construct
  source 1..20: mol_type = other DNA
agttaccaaatcgggagaat

SEQ ID NO: 359 - DNA, 20 bp, synthetic construct
  misc_feature 1..20: note = Synthetic construct
  source 1..20: mol_type = other DNA
gttaccaaatcgggagaatc

SEQ ID NO: 360 - DNA, 20 bp, synthetic construct
  misc_feature 1..20: note = Synthetic construct
  source 1..20: mol_type = other DNA
ttaccaaatcgggagaatcc

SEQ ID NO: 361 - DNA, 20 bp, synthetic construct
  misc_feature 1..20: note = Synthetic construct
  source 1..20: mol_type = other DNA
taccaaatcgggagaatccc

SEQ ID NO: 362 - DNA, 20 bp, synthetic construct
  misc_feature 1..20: note = Synthetic construct
  source 1..20: mol_type = other DNA
accaaatcgggagaatcccg

SEQ ID NO: 363 - DNA, 20 bp, synthetic construct
  misc_feature 1..20: note = Synthetic construct
  source 1..20: mol_type = other DNA
ccaaatcgggagaatcccgg

SEQ ID NO: 364 - DNA, 20 bp, synthetic construct
  misc_feature 1..20: note = Synthetic construct
  source 1..20: mol_type = other DNA
caaatcgggagaatcccggg

SEQ ID NO: 365 - DNA, 20 bp, synthetic construct
  misc_feature 1..20: note = Synthetic construct
  source 1..20: mol_type = other DNA
aaatcgggagaatcccgggt

SEQ ID NO: 366 - DNA, 20 bp, synthetic construct
  misc_feature 1..20: note = Synthetic construct
  source 1..20: mol_type = other DNA
aatcgggagaatcccgggtc

SEQ ID NO: 367 - DNA, 20 bp, synthetic construct
  misc_feature 1..20: note = Synthetic construct
  source 1..20: mol_type = other DNA
atcgggagaatcccgggtcc

SEQ ID NO: 368 - DNA, 20 bp, synthetic construct
  misc_feature 1..20: note = Synthetic construct
  source 1..20: mol_type = other DNA
tcgggagaatcccgggtcct

SEQ ID NO: 369 - DNA, 20 bp, synthetic construct
  misc_feature 1..20: note = Synthetic construct
  source 1..20: mol_type = other DNA
cgggagaatcccgggtcctc

SEQ ID NO: 370 - DNA, 20 bp, synthetic construct
  misc_feature 1..20: note = Synthetic construct
  source 1..20: mol_type = other DNA
gggagaatcccgggtcctct

SEQ ID NO: 371 - DNA, 20 bp, synthetic construct
  misc_feature 1..20: note = Synthetic construct
  source 1..20: mol_type = other DNA
ggagaatcccgggtcctctc

SEQ ID NO: 372 - DNA, 20 bp, synthetic construct
  misc_feature 1..20: note = Synthetic construct
  source 1..20: mol_type = other DNA
gagaatcccgggtcctctct

SEQ ID NO: 373 - DNA, 20 bp, synthetic construct
  misc_feature 1..20: note = Synthetic construct
  source 1..20: mol_type = other DNA
agaatcccgggtcctctctt

SEQ ID NO: 374 - DNA, 20 bp, synthetic construct
  misc_feature 1..20: note = Synthetic construct
  source 1..20: mol_type = other DNA
gaatcccgggtcctctcttt

SEQ ID NO: 375 - DNA, 20 bp, synthetic construct
  misc_feature 1..20: note = Synthetic construct
  source 1..20: mol_type = other DNA
aatcccgggtcctctcttta

SEQ ID NO: 376 - DNA, 20 bp, synthetic construct
  misc_feature 1..20: note = Synthetic construct
  source 1..20: mol_type = other DNA
atcccgggtcctctctttag

SEQ ID NO: 377 - DNA, 20 bp, synthetic construct
  misc_feature 1..20: note = Synthetic construct
  source 1..20: mol_type = other DNA
tcccgggtcctctctttagg

SEQ ID NO: 378 - DNA, 20 bp, synthetic construct
  misc_feature 1..20: note = Synthetic construct
  source 1..20: mol_type = other DNA
cccgggtcctctctttaggg

SEQ ID NO: 379 - DNA, 20 bp, synthetic construct
  misc_feature 1..20: note = Synthetic construct
  source 1..20: mol_type = other DNA
ccgggtcctctctttagggg

SEQ ID NO: 380 - DNA, 20 bp, synthetic construct
  misc_feature 1..20: note = Synthetic construct
  source 1..20: mol_type = other DNA
cgggtcctctctttaggggg

SEQ ID NO: 381 - DNA, 20 bp, synthetic construct
  misc_feature 1..20: note = Synthetic construct
  source 1..20: mol_type = other DNA
gggtcctctctttaggggga

SEQ ID NO: 382 - DNA, 20 bp, synthetic construct
  misc_feature 1..20: note = Synthetic construct
  source 1..20: mol_type = other DNA
ggtcctctctttagggggag

SEQ ID NO: 383 - DNA, 20 bp, synthetic construct
  misc_feature 1..20: note = Synthetic construct
  source 1..20: mol_type = other DNA
gtcctctctttagggggagg

SEQ ID NO: 384 - DNA, 20 bp, synthetic construct
  misc_feature 1..20: note = Synthetic construct
  source 1..20: mol_type = other DNA
tcctctctttagggggaggt

SEQ ID NO: 385 - DNA, 20 bp, synthetic construct
  misc_feature 1..20: note = Synthetic construct
  source 1..20: mol_type = other DNA
cctctctttagggggaggtc

SEQ ID NO: 386 - DNA, 20 bp, synthetic construct
  misc_feature 1..20: note = Synthetic construct
  source 1..20: mol_type = other DNA
ctctctttagggggaggtcc

SEQ ID NO: 387 - DNA, 20 bp, synthetic construct
  misc_feature 1..20: note = Synthetic construct
  source 1..20: mol_type = other DNA
tctctttagggggaggtccc

SEQ ID NO: 388 - DNA, 20 bp, synthetic construct
  misc_feature 1..20: note = Synthetic construct
  source 1..20: mol_type = other DNA
ctctttagggggaggtccct

SEQ ID NO: 389 - DNA, 20 bp, synthetic construct
  misc_feature 1..20: note = Synthetic construct
  source 1..20: mol_type = other DNA
tctttagggggaggtccctg

SEQ ID NO: 390 - DNA, 20 bp, synthetic construct
  misc_feature 1..20: note = Synthetic construct
  source 1..20: mol_type = other DNA
ctttagggggaggtccctgg

SEQ ID NO: 391 - DNA, 20 bp, synthetic construct
  misc_feature 1..20: note = Synthetic construct
  source 1..20: mol_type = other DNA
tttagggggaggtccctggg

SEQ ID NO: 392 - DNA, 20 bp, synthetic construct
  misc_feature 1..20: note = Synthetic construct
  source 1..20: mol_type = other DNA
ttagggggaggtccctgggc

SEQ ID NO: 393 - DNA, 20 bp, synthetic construct
  misc_feature 1..20: note = Synthetic construct
  source 1..20: mol_type = other DNA
tagggggaggtccctgggcc

SEQ ID NO: 394 - DNA, 20 bp, synthetic construct
  misc_feature 1..20: note = Synthetic construct
  source 1..20: mol_type = other DNA
agggggaggtccctgggccg

SEQ ID NO: 395 - DNA, 20 bp, synthetic construct
  misc_feature 1..20: note = Synthetic construct
  source 1..20: mol_type = other DNA
gggggaggtccctgggccga

SEQ ID NO: 396 - DNA, 20 bp, synthetic construct
  misc_feature 1..20: note = Synthetic construct
  source 1..20: mol_type = other DNA
ggggaggtccctgggccgaa

SEQ ID NO: 397 - DNA, 20 bp, synthetic construct
  misc_feature 1..20: note = Synthetic construct
  source 1..20: mol_type = other DNA
gggaggtccctgggccgaag

SEQ ID NO: 398 - DNA, 20 bp, synthetic construct
  misc_feature 1..20: note = Synthetic construct
  source 1..20: mol_type = other DNA
ggaggtccctgggccgaagc

SEQ ID NO: 399 - DNA, 20 bp, synthetic construct
  misc_feature 1..20: note = Synthetic construct
  source 1..20: mol_type = other DNA
gaggtccctgggccgaagcc

SEQ ID NO: 400 - DNA, 20 bp, synthetic construct
  misc_feature 1..20: note = Synthetic construct
  source 1..20: mol_type = other DNA
aggtccctgggccgaagccc

SEQ ID NO: 401 - DNA, 20 bp, synthetic construct
  misc_feature 1..20: note = Synthetic construct
  source 1..20: mol_type = other DNA
ggtccctgggccgaagcccg

SEQ ID NO: 402 - DNA, 20 bp, synthetic construct
  misc_feature 1..20: note = Synthetic construct
  source 1..20: mol_type = other DNA
gtccctgggccgaagcccgc

SEQ ID NO: 403 - DNA, 20 bp, synthetic construct
  misc_feature 1..20: note = Synthetic construct
  source 1..20: mol_type = other DNA
tccctgggccgaagcccgcc

SEQ ID NO: 404 - DNA, 20 bp, synthetic construct
  misc_feature 1..20: note = Synthetic construct
  source 1..20: mol_type = other DNA
ccctgggccgaagcccgccc

SEQ ID NO: 405 - DNA, 20 bp, synthetic construct
  misc_feature 1..20: note = Synthetic construct
  source 1..20: mol_type = other DNA
cctgggccgaagcccgccca

SEQ ID NO: 406 - DNA, 20 bp, synthetic construct
  misc_feature 1..20: note = Synthetic construct
  source 1..20: mol_type = other DNA
ctgggccgaagcccgcccac

SEQ ID NO: 407 - DNA, 20 bp, synthetic construct
  misc_feature 1..20: note = Synthetic construct
  source 1..20: mol_type = other DNA
tgggccgaagcccgcccacc

SEQ ID NO: 408 - DNA, 20 bp, synthetic construct
  misc_feature 1..20: note = Synthetic construct
  source 1..20: mol_type = other DNA
gggccgaagcccgcccacct

SEQ ID NO: 409 - DNA, 20 bp, synthetic construct
  misc_feature 1..20: note = Synthetic construct
  source 1..20: mol_type = other DNA
ggccgaagcccgcccacctt

SEQ ID NO: 410 - DNA, 20 bp, synthetic construct
  misc_feature 1..20: note = Synthetic construct
  source 1..20: mol_type = other DNA
gccgaagcccgcccaccttt

SEQ ID NO: 411 - DNA, 20 bp, synthetic construct
  misc_feature 1..20: note = Synthetic construct
  source 1..20: mol_type = other DNA
ccgaagcccgcccacctttc

SEQ ID NO: 412 - DNA, 20 bp, synthetic construct
  misc_feature 1..20: note = Synthetic construct
  source 1..20: mol_type = other DNA
cgaagcccgcccacctttcg

SEQ ID NO: 413 - DNA, 20 bp, synthetic construct
  misc_feature 1..20: note = Synthetic construct
  source 1..20: mol_type = other DNA
gaagcccgcccacctttcgg

SEQ ID NO: 414 - DNA, 20 bp, synthetic construct
  misc_feature 1..20: note = Synthetic construct
  source 1..20: mol_type = other DNA
aagcccgcccacctttcggt

SEQ ID NO: 415 - DNA, 20 bp, synthetic construct
  misc_feature 1..20: note = Synthetic construct
  source 1..20: mol_type = other DNA
agcccgcccacctttcggtg

SEQ ID NO: 416 - DNA, 20 bp, synthetic construct
  misc_feature 1..20: note = Synthetic construct
  source 1..20: mol_type = other DNA
gcccgcccacctttcggtgg

SEQ ID NO: 417 - DNA, 20 bp, synthetic construct
  misc_feature 1..20: note = Synthetic construct
  source 1..20: mol_type = other DNA
cccgcccacctttcggtgga

SEQ ID NO: 418 - DNA, 20 bp, synthetic construct
  misc_feature 1..20: note = Synthetic construct
  source 1..20: mol_type = other DNA
ccgcccacctttcggtggag

SEQ ID NO: 419 - DNA, 20 bp, synthetic construct
  misc_feature 1..20: note = Synthetic construct
  source 1..20: mol_type = other DNA
cgcccacctttcggtggagc

SEQ ID NO: 420 - DNA, 20 bp, synthetic construct
  misc_feature 1..20: note = Synthetic construct
  source 1..20: mol_type = other DNA
gcccacctttcggtggagcc

SEQ ID NO: 421 - DNA, 20 bp, synthetic construct
  misc_feature 1..20: note = Synthetic construct
  source 1..20: mol_type = other DNA
cccacctttcggtggagccg

SEQ ID NO: 422 - DNA, 20 bp, synthetic construct
  misc_feature 1..20: note = Synthetic construct
  source 1..20: mol_type = other DNA
ccacctttcggtggagccgg

SEQ ID NO: 423 - DNA, 20 bp, synthetic construct
  misc_feature 1..20: note = Synthetic construct
  source 1..20: mol_type = other DNA
cacctttcggtggagccgga

SEQ ID NO: 424 - DNA, 20 bp, synthetic construct
  misc_feature 1..20: note = Synthetic construct
  source 1..20: mol_type = other DNA
acctttcggtggagccggac

SEQ ID NO: 425 - DNA, 20 bp, synthetic construct
  misc_feature 1..20: note = Synthetic construct
  source 1..20: mol_type = other DNA
cctttcggtggagccggacc

SEQ ID NO: 426 - DNA, 20 bp, synthetic construct
  misc_feature 1..20: note = Synthetic construct
  source 1..20: mol_type = other DNA
ctttcggtggagccggaccg

SEQ ID NO: 427 - DNA, 20 bp, synthetic construct
  misc_feature 1..20: note = Synthetic construct
  source 1..20: mol_type = other DNA
tttcggtggagccggaccgc

SEQ ID NO: 428 - DNA, 20 bp, synthetic construct
  misc_feature 1..20: note = Synthetic construct
  source 1..20: mol_type = other DNA
ttcggtggagccggaccgct

SEQ ID NO: 429 - DNA, 20 bp, synthetic construct
  misc_feature 1..20: note = Synthetic construct
  source 1..20: mol_type = other DNA
tcggtggagccggaccgctt

SEQ ID NO: 430 - DNA, 20 bp, synthetic construct
  misc_feature 1..20: note = Synthetic construct
  source 1..20: mol_type = other DNA
cggtggagccggaccgcttt

SEQ ID NO: 431 - DNA, 20 bp, synthetic construct
  misc_feature 1..20: note = Synthetic construct
  source 1..20: mol_type = other DNA
ggtggagccggaccgctttc

SEQ ID NO: 432 - DNA, 20 bp, synthetic construct
  misc_feature 1..20: note = Synthetic construct
  source 1..20: mol_type = other DNA
gtggagccggaccgctttcg

SEQ ID NO: 433 - DNA, 20 bp, synthetic construct
  misc_feature 1..20: note = Synthetic construct
  source 1..20: mol_type = other DNA
tggagccggaccgctttcgc

SEQ ID NO: 434 - DNA, 20 bp, synthetic construct
  misc_feature 1..20: note = Synthetic construct
  source 1..20: mol_type = other DNA
ggagccggaccgctttcgca

SEQ ID NO: 435 - DNA, 20 bp, synthetic construct
  misc_feature 1..20: note = Synthetic construct
  source 1..20: mol_type = other DNA
gagccggaccgctttcgcac

SEQ ID NO: 436 - DNA, 20 bp, synthetic construct
  misc_feature 1..20: note = Synthetic construct
  source 1..20: mol_type = other DNA
agccggaccgctttcgcacc

SEQ ID NO: 437 - DNA, 20 bp, synthetic construct
  misc_feature 1..20: note = Synthetic construct
  source 1..20: mol_type = other DNA
gccggaccgctttcgcaccc

SEQ ID NO: 438 - DNA, 20 bp, synthetic construct
  misc_feature 1..20: note = Synthetic construct
  source 1..20: mol_type = other DNA
ccggaccgctttcgcacccg

SEQ ID NO: 439 - DNA, 20 bp, synthetic construct
  misc_feature 1..20: note = Synthetic construct
  source 1..20: mol_type = other DNA
cggaccgctttcgcacccgt

SEQ ID NO: 440 - DNA, 20 bp, synthetic construct
  misc_feature 1..20: note = Synthetic construct
  source 1..20: mol_type = other DNA
ggaccgctttcgcacccgtg

SEQ ID NO: 441 - DNA, 20 bp, synthetic construct
  misc_feature 1..20: note = Synthetic construct
  source 1..20: mol_type = other DNA
gaccgctttcgcacccgtgc

SEQ ID NO: 442 - DNA, 20 bp, synthetic construct
  misc_feature 1..20: note = Synthetic construct
  source 1..20: mol_type = other DNA
accgctttcgcacccgtgct

SEQ ID NO: 443 - DNA, 20 bp, synthetic construct
  misc_feature 1..20: note = Synthetic construct
  source 1..20: mol_type = other DNA
ccgctttcgcacccgtgctc

SEQ ID NO: 444 - DNA, 20 bp, synthetic construct
  misc_feature 1..20: note = Synthetic construct
  source 1..20: mol_type = other DNA
cgctttcgcacccgtgctct

SEQ ID NO: 445 - DNA, 20 bp, synthetic construct
  misc_feature 1..20: note = Synthetic construct
  source 1..20: mol_type = other DNA
gctttcgcacccgtgctctt

SEQ ID NO: 446 - DNA, 20 bp, synthetic construct
  misc_feature 1..20: note = Synthetic construct
  source 1..20: mol_type = other DNA
ctttcgcacccgtgctcttt

SEQ ID NO: 447 - DNA, 20 bp, synthetic construct
  misc_feature 1..20: note = Synthetic construct
  source 1..20: mol_type = other DNA
tttcgcacccgtgctctttc

SEQ ID NO: 448 - DNA, 20 bp, synthetic construct
  misc_feature 1..20: note = Synthetic construct
  source 1..20: mol_type = other DNA
ttcgcacccgtgctctttcg

SEQ ID NO: 449 - DNA, 20 bp, synthetic construct
  misc_feature 1..20: note = Synthetic construct
  source 1..20: mol_type = other DNA
tcgcacccgtgctctttcga

SEQ ID NO: 450 - DNA, 20 bp, synthetic construct
  misc_feature 1..20: note = Synthetic construct
  source 1..20: mol_type = other DNA
cgcacccgtgctctttcgag

SEQ ID NO: 451 - DNA, 20 bp, synthetic construct
  misc_feature 1..20: note = Synthetic construct
  source 1..20: mol_type = other DNA
gcacccgtgctctttcgagc

SEQ ID NO: 452 - DNA, 20 bp, synthetic construct
  misc_feature 1..20: note = Synthetic construct
  source 1..20: mol_type = other DNA
cacccgtgctctttcgagca

SEQ ID NO: 453 - DNA, 20 bp, synthetic construct
  misc_feature 1..20: note = Synthetic construct
  source 1..20: mol_type = other DNA
acccgtgctctttcgagcac

SEQ ID NO: 454 - DNA, 20 bp, synthetic construct
  misc_feature 1..20: note = Synthetic construct
  source 1..20: mol_type = other DNA
cccgtgctctttcgagcaca

SEQ ID NO: 455 - DNA, 20 bp, synthetic construct
  misc_feature 1..20: note = Synthetic construct
  source 1..20: mol_type = other DNA
ccgtgctctttcgagcacac

SEQ ID NO: 456 - DNA, 20 bp, synthetic construct
  misc_feature 1..20: note = Synthetic construct
  source 1..20: mol_type = other DNA
cgtgctctttcgagcacacc

SEQ ID NO: 457 - DNA, 20 bp, synthetic construct
  misc_feature 1..20: note = Synthetic construct
  source 1..20: mol_type = other DNA
gtgctctttcgagcacaccc

SEQ ID NO: 458 - DNA, 20 bp, synthetic construct
  misc_feature 1..20: note = Synthetic construct
  source 1..20: mol_type = other DNA
tgctctttcgagcacaccca

SEQ ID NO: 459 - DNA, 20 bp, synthetic construct
  misc_feature 1..20: note = Synthetic construct
  source 1..20: mol_type = other DNA
gctctttcgagcacacccac

SEQ ID NO: 460 - DNA, 20 bp, synthetic construct
  misc_feature 1..20: note = Synthetic construct
  source 1..20: mol_type = other DNA
ctctttcgagcacacccacc

SEQ ID NO: 461 - DNA, 20 bp, synthetic construct
  misc_feature 1..20: note = Synthetic construct
  source 1..20: mol_type = other DNA
tctttcgagcacacccaccc

SEQ ID NO: 462 - DNA, 20 bp, synthetic construct
  misc_feature 1..20: note = Synthetic construct
  source 1..20: mol_type = other DNA
ctttcgagcacacccacccc

SEQ ID NO: 463 - DNA, 20 bp, synthetic construct
  misc_feature 1..20: note = Synthetic construct
  source 1..20: mol_type = other DNA
tttcgagcacacccaccccg

SEQ ID NO: 464 - DNA, 20 bp, synthetic construct
  misc_feature 1..20: note = Synthetic construct
  source 1..20: mol_type = other DNA
ttcgagcacacccaccccgt

SEQ ID NO: 465 - DNA, 20 bp, synthetic construct
  misc_feature 1..20: note = Synthetic construct
  source 1..20: mol_type = other DNA
tcgagcacacccaccccgtt

SEQ ID NO: 466 - DNA, 20 bp, synthetic construct
  misc_feature 1..20: note = Synthetic construct
  source 1..20: mol_type = other DNA
cgagcacacccaccccgttt

SEQ ID NO: 467 - DNA, 20 bp, synthetic construct
  misc_feature 1..20: note = Synthetic construct
  source 1..20: mol_type = other DNA
gagcacacccaccccgttta

SEQ ID NO: 468 - DNA, 20 bp, synthetic construct
  misc_feature 1..20: note = Synthetic construct
  source 1..20: mol_type = other DNA
agcacacccaccccgtttac

SEQ ID NO: 469 - DNA, 20 bp, synthetic construct
  misc_feature 1..20: note = Synthetic construct
  source 1..20: mol_type = other DNA
gcacacccaccccgtttacg

SEQ ID NO: 470 - DNA, 20 bp, synthetic construct
  misc_feature 1..20: note = Synthetic construct
  source 1..20: mol_type = other DNA
cacacccaccccgtttacgg

SEQ ID NO: 471 - DNA, 20 bp, synthetic construct
  misc_feature 1..20: note = Synthetic construct
  source 1..20: mol_type = other DNA
acacccaccccgtttacggg

SEQ ID NO: 472 - DNA, 20 bp, synthetic construct
  misc_feature 1..20: note = Synthetic construct
  source 1..20: mol_type = other DNA
cacccaccccgtttacgggg

SEQ ID NO: 473 - DNA, 20 bp, synthetic construct
  misc_feature 1..20: note = Synthetic construct
  source 1..20: mol_type = other DNA
acccaccccgtttacggggg

SEQ ID NO: 474 - DNA, 20 bp, synthetic construct
  misc_feature 1..20: note = Synthetic construct
  source 1..20: mol_type = other DNA
cccaccccgtttacgggggt

SEQ ID NO: 475 - DNA, 20 bp, synthetic construct
  misc_feature 1..20: note = Synthetic construct
  source 1..20: mol_type = other DNA
ccaccccgtttacgggggtc

SEQ ID NO: 476 - DNA, 20 bp, synthetic construct
  misc_feature 1..20: note = Synthetic construct
  source 1..20: mol_type = other DNA
caccccgtttacgggggtcc

SEQ ID NO: 477 - DNA, 20 bp, synthetic construct
  misc_feature 1..20: note = Synthetic construct
  source 1..20: mol_type = other DNA
accccgtttacgggggtccc

SEQ ID NO: 478 - DNA, 20 bp, synthetic construct
  misc_feature 1..20: note = Synthetic construct
  source 1..20: mol_type = other DNA
ccccgtttacgggggtccct

SEQ ID NO: 479 - DNA, 20 bp, synthetic construct
  misc_feature 1..20: note = Synthetic construct
  source 1..20: mol_type = other DNA
cccgtttacgggggtccctc

SEQ ID NO: 480 - DNA, 20 bp, synthetic construct
  misc_feature 1..20: note = Synthetic construct
  source 1..20: mol_type = other DNA
ccgtttacgggggtccctcg

SEQ ID NO: 481 - DNA, 20 bp, synthetic construct
  misc_feature 1..20: note = Synthetic construct
  source 1..20: mol_type = other DNA
cgtttacgggggtccctcgg

SEQ ID NO: 482 - DNA, 20 bp, synthetic construct
  misc_feature 1..20: note = Synthetic construct
  source 1..20: mol_type = other DNA
gtttacgggggtccctcggt

SEQ ID NO: 483 - DNA, 20 bp, synthetic construct
  misc_feature 1..20: note = Synthetic construct
  source 1..20: mol_type = other DNA
tttacgggggtccctcggtc

SEQ ID NO: 484 - DNA, 20 bp, synthetic construct
  misc_feature 1..20: note = Synthetic construct
  source 1..20: mol_type = other DNA
ttacgggggtccctcggtca

SEQ ID NO: 485 - DNA, 20 bp, synthetic construct
  misc_feature 1..20: note = Synthetic construct
  source 1..20: mol_type = other DNA
tacgggggtccctcggtcag

SEQ ID NO: 486 - DNA, 20 bp, synthetic construct
  misc_feature 1..20: note = Synthetic construct
  source 1..20: mol_type = other DNA
acgggggtccctcggtcagc

SEQ ID NO: 487 - DNA, 20 bp, synthetic construct
  misc_feature 1..20: note = Synthetic construct
  source 1..20: mol_type = other DNA
cgggggtccctcggtcagct

SEQ ID NO: 488 - DNA, 20 bp, synthetic construct
  misc_feature 1..20: note = Synthetic construct
  source 1..20: mol_type = other DNA
gggggtccctcggtcagcta

SEQ ID NO: 489 - DNA, 20 bp, synthetic construct
  misc_feature 1..20: note = Synthetic construct
  source 1..20: mol_type = other DNA
ggggtccctcggtcagctac

SEQ ID NO: 490 - DNA, 20 bp, synthetic construct
  misc_feature 1..20: note = Synthetic construct
  source 1..20: mol_type = other DNA
gggtccctcggtcagctacc

SEQ ID NO: 491 - DNA, 20 bp, synthetic construct
  misc_feature 1..20: note = Synthetic construct
  source 1..20: mol_type = other DNA
ggtccctcggtcagctaccg

SEQ ID NO: 492 - DNA, 20 bp, synthetic construct
  misc_feature 1..20: note = Synthetic construct
  source 1..20: mol_type = other DNA
gtccctcggtcagctaccga

SEQ ID NO: 493 - DNA, 20 bp, synthetic construct
  misc_feature 1..20: note = Synthetic construct
  source 1..20: mol_type = other DNA
tccctcggtcagctaccgag

SEQ ID NO: 494 - DNA, 20 bp, synthetic construct
  misc_feature 1..20: note = Synthetic construct
  source 1..20: mol_type = other DNA
ccctcggtcagctaccgagg

SEQ ID NO: 495 - DNA, 20 bp, synthetic construct
  misc_feature 1..20: note = Synthetic construct
  source 1..20: mol_type = other DNA
cctcggtcagctaccgagga

SEQ ID NO: 496 - DNA, 20 bp, synthetic construct
  misc_feature 1..20: note = Synthetic construct
  source 1..20: mol_type = other DNA
ctcggtcagctaccgaggag

SEQ ID NO: 497 - DNA, 20 bp, synthetic construct
  misc_feature 1..20: note = Synthetic construct
  source 1..20: mol_type = other DNA
tcggtcagctaccgaggaga

SEQ ID NO: 498 - DNA, 20 bp, synthetic construct
  misc_feature 1..20: note = Synthetic construct
  source 1..20: mol_type = other DNA
cggtcagctaccgaggagag

SEQ ID NO: 499 - DNA, 20 bp, synthetic construct
  misc_feature 1..20: note = Synthetic construct
  source 1..20: mol_type = other DNA
ggtcagctaccgaggagagc

SEQ ID NO: 500 - DNA, 20 bp, synthetic construct
  misc_feature 1..20: note = Synthetic construct
  source 1..20: mol_type = other DNA
gtcagctaccgaggagagct

SEQ ID NO: 501 - DNA, 20 bp, synthetic construct
  misc_feature 1..20: note = Synthetic construct
  source 1..20: mol_type = other DNA
tcagctaccgaggagagctc

SEQ ID NO: 502 - DNA, 20 bp, synthetic construct
  misc_feature 1..20: note = Synthetic construct
  source 1..20: mol_type = other DNA
cagctaccgaggagagctcg

SEQ ID NO: 503 - DNA, 20 bp, synthetic construct
  misc_feature 1..20: note = Synthetic construct
  source 1..20: mol_type = other DNA
agctaccgaggagagctcgc

SEQ ID NO: 504 - DNA, 20 bp, synthetic construct
  misc_feature 1..20: note = Synthetic construct
  source 1..20: mol_type = other DNA
gctaccgaggagagctcgct

SEQ ID NO: 505 - DNA, 20 bp, synthetic construct
  misc_feature 1..20: note = Synthetic construct
  source 1..20: mol_type = other DNA
ctaccgaggagagctcgctg

SEQ ID NO: 506 - DNA, 20 bp, synthetic construct
  misc_feature 1..20: note = Synthetic construct
  source 1..20: mol_type = other DNA
taccgaggagagctcgctgg

SEQ ID NO: 507 - DNA, 20 bp, synthetic construct
  misc_feature 1..20: note = Synthetic construct
  source 1..20: mol_type = other DNA
accgaggagagctcgctggc

SEQ ID NO: 508 - DNA, 20 bp, synthetic construct
  misc_feature 1..20: note = Synthetic construct
  source 1..20: mol_type = other DNA
ccgaggagagctcgctggcc

SEQ ID NO: 509 - DNA, 20 bp, synthetic construct
  misc_feature 1..20: note = Synthetic construct
  source 1..20: mol_type = other DNA
cgaggagagctcgctggccc

SEQ ID NO: 510 - DNA, 20 bp, synthetic construct
  misc_feature 1..20: note = Synthetic construct
  source 1..20: mol_type = other DNA
gaggagagctcgctggccca

SEQ ID NO: 511 - DNA, 20 bp, synthetic construct
  misc_feature 1..20: note = Synthetic construct
  source 1..20: mol_type = other DNA
aggagagctcgctggcccac

SEQ ID NO: 512 - DNA, 20 bp, synthetic construct
  misc_feature 1..20: note = Synthetic construct
  source 1..20: mol_type = other DNA
ggagagctcgctggcccaca

SEQ ID NO: 513 - DNA, 20 bp, synthetic construct
  misc_feature 1..20: note = Synthetic construct
  source 1..20: mol_type = other DNA
gagagctcgctggcccacac

SEQ ID NO: 514 - DNA, 20 bp, synthetic construct
  misc_feature 1..20: note = Synthetic construct
  source 1..20: mol_type = other DNA
agagctcgctggcccacact

SEQ ID NO: 515 - DNA, 20 bp, synthetic construct
  misc_feature 1..20: note = Synthetic construct
  source 1..20: mol_type = other DNA
gagctcgctggcccacactc

SEQ ID NO: 516 - DNA, 20 bp, synthetic construct
  misc_feature 1..20: note = Synthetic construct
  source 1..20: mol_type = other DNA
agctcgctggcccacactcc

SEQ ID NO: 517 - DNA, 20 bp, synthetic construct
  misc_feature 1..20: note = Synthetic construct
  source 1..20: mol_type = other DNA
gctcgctggcccacactcct

SEQ ID NO: 518 - DNA, 20 bp, synthetic construct
  misc_feature 1..20: note = Synthetic construct
  source 1..20: mol_type = other DNA
ctcgctggcccacactcctg

SEQ ID NO: 519 - DNA, 20 bp, synthetic construct
  misc_feature 1..20: note = Synthetic construct
  source 1..20: mol_type = other DNA
tcgctggcccacactcctga

SEQ ID NO: 520 - DNA, 20 bp, synthetic construct
  misc_feature 1..20: note = Synthetic construct
  source 1..20: mol_type = other DNA
cgctggcccacactcctgag

SEQ ID NO: 521 - DNA, 20 bp, synthetic construct
  misc_feature 1..20: note = Synthetic construct
  source 1..20: mol_type = other DNA
gctggcccacactcctgagg

SEQ ID NO: 522 - DNA, 20 bp, synthetic construct
  misc_feature 1..20: note = Synthetic construct
  source 1..20: mol_type = other DNA
ctggcccacactcctgaggg

SEQ ID NO: 523 - DNA, 20 bp, synthetic construct
  misc_feature 1..20: note = Synthetic construct
  source 1..20: mol_type = other DNA
tggcccacactcctgaggga

SEQ ID NO: 524 - DNA, 20 bp, synthetic construct
  misc_feature 1..20: note = Synthetic construct
  source 1..20: mol_type = other DNA
ggcccacactcctgagggaa

SEQ ID NO: 525 - DNA, 20 bp, synthetic construct
  misc_feature 1..20: note = Synthetic construct
  source 1..20: mol_type = other DNA
gcccacactcctgagggaat

SEQ ID NO: 526 - DNA, 20 bp, synthetic construct
  misc_feature 1..20: note = Synthetic construct
  source 1..20: mol_type = other DNA
cccacactcctgagggaatg

SEQ ID NO: 527 - DNA, 20 bp, synthetic construct
  misc_feature 1..20: note = Synthetic construct
  source 1..20: mol_type = other DNA
ccacactcctgagggaatgt

SEQ ID NO: 528 - DNA, 20 bp, synthetic construct
  misc_feature 1..20: note = Synthetic construct
  source 1..20: mol_type = other DNA
cacactcctgagggaatgtg

SEQ ID NO: 529 - DNA, 20 bp, synthetic construct
  misc_feature 1..20: note = Synthetic construct
  source 1..20: mol_type = other DNA
acactcctgagggaatgtgg

SEQ ID NO: 530 - DNA, 20 bp, synthetic construct
  misc_feature 1..20: note = Synthetic construct
  source 1..20: mol_type = other DNA
cactcctgagggaatgtggg

SEQ ID NO: 531 - DNA, 20 bp, synthetic construct
  misc_feature 1..20: note = Synthetic construct
  source 1..20: mol_type = other DNA
actcctgagggaatgtggga

SEQ ID NO: 532 - DNA, 20 bp, synthetic construct
  misc_feature 1..20: note = Synthetic construct
  source 1..20: mol_type = other DNA
ctcctgagggaatgtgggaa

SEQ ID NO: 533 - DNA, 20 bp, synthetic construct
  misc_feature 1..20: note = Synthetic construct
  source 1..20: mol_type = other DNA
tcctgagggaatgtgggaac

SEQ ID NO: 534 - DNA, 20 bp, synthetic construct
  misc_feature 1..20: note = Synthetic construct
  source 1..20: mol_type = other DNA
cctgagggaatgtgggaacc

SEQ ID NO: 535 - DNA, 20 bp, synthetic construct
  misc_feature 1..20: note = Synthetic construct
  source 1..20: mol_type = other DNA
ctgagggaatgtgggaaccg

SEQ ID NO: 536 - DNA, 20 bp, synthetic construct
  misc_feature 1..20: note = Synthetic construct
  source 1..20: mol_type = other DNA
tgagggaatgtgggaaccgg

SEQ ID NO: 537 - DNA, 20 bp, synthetic construct
  misc_feature 1..20: note = Synthetic construct
  source 1..20: mol_type = other DNA
gagggaatgtgggaaccggc

SEQ ID NO: 538 - DNA, 20 bp, synthetic construct
  misc_feature 1..20: note = Synthetic construct
  source 1..20: mol_type = other DNA
agggaatgtgggaaccggcg

SEQ ID NO: 539 - DNA, 20 bp, synthetic construct
  misc_feature 1..20: note = Synthetic construct
  source 1..20: mol_type = other DNA
gggaatgtgggaaccggcgt

SEQ ID NO: 540 - DNA, 20 bp, synthetic construct
  misc_feature 1..20: note = Synthetic construct
  source 1..20: mol_type = other DNA
ggaatgtgggaaccggcgtt

SEQ ID NO: 541 - DNA, 20 bp, synthetic construct
  misc_feature 1..20: note = Synthetic construct
  source 1..20: mol_type = other DNA
gaatgtgggaaccggcgtta

SEQ ID NO: 542 - DNA, 20 bp, synthetic construct
  misc_feature 1..20: note = Synthetic construct
  source 1..20: mol_type = other DNA
aatgtgggaaccggcgttag

SEQ ID NO: 543 - DNA, 20 bp, synthetic construct
  misc_feature 1..20: note = Synthetic construct
  source 1..20: mol_type = other DNA
atgtgggaaccggcgttagc

SEQ ID NO: 544 - DNA, 20 bp, synthetic construct
  misc_feature 1..20: note = Synthetic construct
  source 1..20: mol_type = other DNA
tgtgggaaccggcgttagcc

SEQ ID NO: 545 - DNA, 20 bp, synthetic construct
  misc_feature 1..20: note = Synthetic construct
  source 1..20: mol_type = other DNA
gtgggaaccggcgttagcca

SEQ ID NO: 546 - DNA, 20 bp, synthetic construct
  misc_feature 1..20: note = Synthetic construct
  source 1..20: mol_type = other DNA
tgggaaccggcgttagccac

SEQ ID NO: 547 - DNA, 20 bp, synthetic construct
  misc_feature 1..20: note = Synthetic construct
  source 1..20: mol_type = other DNA
gggaaccggcgttagccact

SEQ ID NO: 548 - DNA, 20 bp, synthetic construct
  misc_feature 1..20: note = Synthetic construct
  source 1..20: mol_type = other DNA
ggaaccggcgttagccactc

SEQ ID NO: 549 - DNA, 20 bp, synthetic construct
  misc_feature 1..20: note = Synthetic construct
  source 1..20: mol_type = other DNA
gaaccggcgttagccactcc

SEQ ID NO: 550 - DNA, 20 bp, synthetic construct
  misc_feature 1..20: note = Synthetic construct
  source 1..20: mol_type = other DNA
aaccggcgttagccactccg

SEQ ID NO: 551 - DNA, 20 bp, synthetic construct
  misc_feature 1..20: note = Synthetic construct
  source 1..20: mol_type = other DNA
accggcgttagccactccga

SEQ ID NO: 552 - DNA, 20 bp, synthetic construct
  misc_feature 1..20: note = Synthetic construct
  source 1..20: mol_type = other DNA
ccggcgttagccactccgaa

SEQ ID NO: 553 - DNA, 20 bp, synthetic construct
  misc_feature 1..20: note = Synthetic construct
  source 1..20: mol_type = other DNA
cggcgttagccactccgaag

SEQ ID NO: 554 - DNA, 20 bp, synthetic construct
  misc_feature 1..20: note = Synthetic construct
  source 1..20: mol_type = other DNA
ggcgttagccactccgaagt

SEQ ID NO: 555 - DNA, 20 bp, synthetic construct
  misc_feature 1..20: note = Synthetic construct
  source 1..20: mol_type = other DNA
gcgttagccactccgaagtg

SEQ ID NO: 556 - DNA, 20 bp, synthetic construct
  misc_feature 1..20: note = Synthetic construct
  source 1..20: mol_type = other DNA
cgttagccactccgaagtgc

SEQ ID NO: 557 - DNA, 20 bp, synthetic construct
  misc_feature 1..20: note = Synthetic construct
  source 1..20: mol_type = other DNA
gttagccactccgaagtgcg

SEQ ID NO: 558 - DNA, 20 bp, synthetic construct
  misc_feature 1..20: note = Synthetic construct
  source 1..20: mol_type = other DNA
ttagccactccgaagtgcgt

SEQ ID NO: 559 - DNA, 20 bp, synthetic construct
  misc_feature 1..20: note = Synthetic construct
  source 1..20: mol_type = other DNA
tagccactccgaagtgcgta

SEQ ID NO: 560 - DNA, 20 bp, synthetic construct
  misc_feature 1..20: note = Synthetic construct
  source 1..20: mol_type = other DNA
agccactccgaagtgcgtat

SEQ ID NO: 561 - DNA, 20 bp, synthetic construct
  misc_feature 1..20: note = Synthetic construct
  source 1..20: mol_type = other DNA
gccactccgaagtgcgtata

SEQ ID NO: 562 - DNA, 20 bp, synthetic construct
  misc_feature 1..20: note = Synthetic construct
  source 1..20: mol_type = other DNA
ccactccgaagtgcgtataa

SEQ ID NO: 563 - DNA, 20 bp, synthetic construct
  misc_feature 1..20: note = Synthetic construct
  source 1..20: mol_type = other DNA
cactccgaagtgcgtataac

SEQ ID NO: 564 - DNA, 20 bp, synthetic construct
  misc_feature 1..20: note = Synthetic construct
  source 1..20: mol_type = other DNA
actccgaagtgcgtataacg

SEQ ID NO: 565 - DNA, 20 bp, synthetic construct
  misc_feature 1..20: note = Synthetic construct
  source 1..20: mol_type = other DNA
ctccgaagtgcgtataacgc

SEQ ID NO: 566 - DNA, 20 bp, synthetic construct
  misc_feature 1..20: note = Synthetic construct
  source 1..20: mol_type = other DNA
tccgaagtgcgtataacgcg

SEQ ID NO: 567 - DNA, 20 bp, synthetic construct
  misc_feature 1..20: note = Synthetic construct
  source 1..20: mol_type = other DNA
ccgaagtgcgtataacgcgc

SEQ ID NO: 568 - DNA, 20 bp, synthetic construct
  misc_feature 1..20: note = Synthetic construct
  source 1..20: mol_type = other DNA
cgaagtgcgtataacgcgca

SEQ ID NO: 569 - DNA, 20 bp, synthetic construct
  misc_feature 1..20: note = Synthetic construct
  source 1..20: mol_type = other DNA
gaagtgcgtataacgcgcac

SEQ ID NO: 570 - DNA, 20 bp, synthetic construct
  misc_feature 1..20: note = Synthetic construct
  source 1..20: mol_type = other DNA
aagtgcgtataacgcgcacg

SEQ ID NO: 571 - DNA, 20 bp, synthetic construct
  misc_feature 1..20: note = Synthetic construct
  source 1..20: mol_type = other DNA
agtgcgtataacgcgcacgc

SEQ ID NO: 572 - DNA, 20 bp, synthetic construct
  misc_feature 1..20: note = Synthetic construct
  source 1..20: mol_type = other DNA
gtgcgtataacgcgcacgcc

SEQ ID NO: 573 - DNA, 20 bp, synthetic construct
  misc_feature 1..20: note = Synthetic construct
  source 1..20: mol_type = other DNA
tgcgtataacgcgcacgccg

SEQ ID NO: 574 - DNA, 20 bp, synthetic construct
  misc_feature 1..20: note = Synthetic construct
  source 1..20: mol_type = other DNA
gcgtataacgcgcacgccgg

SEQ ID NO: 575 - DNA, 20 bp, synthetic construct
  misc_feature 1..20: note = Synthetic construct
  source 1..20: mol_type = other DNA
cgtataacgcgcacgccggc

SEQ ID NO: 576 - DNA, 20 bp, synthetic construct
  misc_feature 1..20: note = Synthetic construct
  source 1..20: mol_type = other DNA
gtataacgcgcacgccggcg

SEQ ID NO: 577 - DNA, 20 bp, synthetic construct
  misc_feature 1..20: note = Synthetic construct
  source 1..20: mol_type = other DNA
tataacgcgcacgccggcgg

SEQ ID NO: 578 - DNA, 20 bp, synthetic construct
  misc_feature 1..20: note = Synthetic construct
  source 1..20: mol_type = other DNA
ataacgcgcacgccggcgga

SEQ ID NO: 579 - DNA, 20 bp, synthetic construct
  misc_feature 1..20: note = Synthetic construct
  source 1..20: mol_type = other DNA
taacgcgcacgccggcggac

SEQ ID NO: 580 - DNA, 20 bp, synthetic construct
  misc_feature 1..20: note = Synthetic construct
  source 1..20: mol_type = other DNA
aacgcgcacgccggcggact

SEQ ID NO: 581 - DNA, 20 bp, synthetic construct
  misc_feature 1..20: note = Synthetic construct
  source 1..20: mol_type = other DNA
acgcgcacgccggcggactt

SEQ ID NO: 582 - DNA, 20 bp, synthetic construct
  misc_feature 1..20: note = Synthetic construct
  source 1..20: mol_type = other DNA
cgcgcacgccggcggacttc

SEQ ID NO: 583 - DNA, 20 bp, synthetic construct
  misc_feature 1..20: note = Synthetic construct
  source 1..20: mol_type = other DNA
gcgcacgccggcggacttca

SEQ ID NO: 584 - DNA, 20 bp, synthetic construct
  misc_feature 1..20: note = Synthetic construct
  source 1..20: mol_type = other DNA
cgcacgccggcggacttcat

SEQ ID NO: 585 - DNA, 20 bp, synthetic construct
  misc_feature 1..20: note = Synthetic construct
  source 1..20: mol_type = other DNA
gcacgccggcggacttcatg

SEQ ID NO: 586 - DNA, 20 bp, synthetic construct
  misc_feature 1..20: note = Synthetic construct
  source 1..20: mol_type = other DNA
cacgccggcggacttcatgc

SEQ ID NO: 587 - DNA, 20 bp, synthetic construct
  misc_feature 1..20: note = Synthetic construct
  source 1..20: mol_type = other DNA
acgccggcggacttcatgct

SEQ ID NO: 588 - DNA, 20 bp, synthetic construct
  misc_feature 1..20: note = Synthetic construct
  source 1..20: mol_type = other DNA
cgccggcggacttcatgctg

SEQ ID NO: 589 - DNA, 20 bp, synthetic construct
  misc_feature 1..20: note = Synthetic construct
  source 1..20: mol_type = other DNA
gccggcggacttcatgctgt

SEQ ID NO: 590 - DNA, 20 bp, synthetic construct
  misc_feature 1..20: note = Synthetic construct
  source 1..20: mol_type = other DNA
ccggcggacttcatgctgtc

SEQ ID NO: 591 - DNA, 20 bp, synthetic construct
  misc_feature 1..20: note = Synthetic construct
  source 1..20: mol_type = other DNA
cggcggacttcatgctgtcg

SEQ ID NO: 592 - DNA, 20 bp, synthetic construct
  misc_feature 1..20: note = Synthetic construct
  source 1..20: mol_type = other DNA
ggcggacttcatgctgtcgg

SEQ ID NO: 593 - DNA, 20 bp, synthetic construct
  misc_feature 1..20: note = Synthetic construct
  source 1..20: mol_type = other DNA
gcggacttcatgctgtcggt

SEQ ID NO: 594 - DNA, 20 bp, synthetic construct
  misc_feature 1..20: note = Synthetic construct
  source 1..20: mol_type = other DNA
cggacttcatgctgtcggtg

SEQ ID NO: 595 - DNA, 20 bp, synthetic construct
  misc_feature 1..20: note = Synthetic construct
  source 1..20: mol_type = other DNA
ggacttcatgctgtcggtga

SEQ ID NO: 596 - DNA, 20 bp, synthetic construct
  misc_feature 1..20: note = Synthetic construct
  source 1..20: mol_type = other DNA
gacttcatgctgtcggtgat

SEQ ID NO: 597 - DNA, 20 bp, synthetic construct
  misc_feature 1..20: note = Synthetic construct
  source 1..20: mol_type = other DNA
acttcatgctgtcggtgatt

SEQ ID NO: 598 - DNA, 20 bp, synthetic construct
  misc_feature 1..20: note = Synthetic construct
  source 1..20: mol_type = other DNA
cttcatgctgtcggtgattt

SEQ ID NO: 599 - DNA, 20 bp, synthetic construct
  misc_feature 1..20: note = Synthetic construct
  source 1..20: mol_type = other DNA
ttcatgctgtcggtgatttc

SEQ ID NO: 600 - DNA, 20 bp, synthetic construct
  misc_feature 1..20: note = Synthetic construct
  source 1..20: mol_type = other DNA
tcatgctgtcggtgatttca

SEQ ID NO: 601 - DNA, 20 bp, synthetic construct
  misc_feature 1..20: note = Synthetic construct
  source 1..20: mol_type = other DNA
catgctgtcggtgatttcac

SEQ ID NO: 602 - DNA, 20 bp, synthetic construct
  misc_feature 1..20: note = Synthetic construct
  source 1..20: mol_type = other DNA
atgctgtcggtgatttcacc

SEQ ID NO: 603 - DNA, 20 bp, synthetic construct
  misc_feature 1..20: note = Synthetic construct
  source 1..20: mol_type = other DNA
tgctgtcggtgatttcacct

SEQ ID NO: 604 - DNA, 20 bp, synthetic construct
  misc_feature 1..20: note = Synthetic construct
  source 1..20: mol_type = other DNA
gctgtcggtgatttcacctc

SEQ ID NO: 605 - DNA, 20 bp, synthetic construct
  misc_feature 1..20: note = Synthetic construct
  source 1..20: mol_type = other DNA
ctgtcggtgatttcacctcc

SEQ ID NO: 606 - DNA, 20 bp, synthetic construct
  misc_feature 1..20: note = Synthetic construct
  source 1..20: mol_type = other DNA
tgtcggtgatttcacctcca

SEQ ID NO: 607 - DNA, 20 bp, synthetic construct
  misc_feature 1..20: note = Synthetic construct
  source 1..20: mol_type = other DNA
gtcggtgatttcacctccag

SEQ ID NO: 608 - DNA, 20 bp, synthetic construct
  misc_feature 1..20: note = Synthetic construct
  source 1..20: mol_type = other DNA
tcggtgatttcacctccagt

SEQ ID NO: 609 - DNA, 20 bp, synthetic construct
  misc_feature 1..20: note = Synthetic construct
  source 1..20: mol_type = other DNA
cggtgatttcacctccagta

SEQ ID NO: 610 - DNA, 20 bp, synthetic construct
  misc_feature 1..20: note = Synthetic construct
  source 1..20: mol_type = other DNA
ggtgatttcacctccagtat

SEQ ID NO: 611 - DNA, 20 bp, synthetic construct
  misc_feature 1..20: note = Synthetic construct
  source 1..20: mol_type = other DNA
gtgatttcacctccagtatg

SEQ ID NO: 612 - DNA, 20 bp, synthetic construct
  misc_feature 1..20: note = Synthetic construct
  source 1..20: mol_type = other DNA
tgatttcacctccagtatgg

SEQ ID NO: 613 - DNA, 20 bp, synthetic construct
  misc_feature 1..20: note = Synthetic construct
  source 1..20: mol_type = other DNA
gatttcacctccagtatgga

SEQ ID NO: 614 - DNA, 20 bp, synthetic construct
  misc_feature 1..20: note = Synthetic construct
  source 1..20: mol_type = other DNA
atttcacctccagtatggaa

SEQ ID NO: 615 - DNA, 20 bp, synthetic construct
  misc_feature 1..20: note = Synthetic construct
  source 1..20: mol_type = other DNA
tttcacctccagtatggaac

SEQ ID NO: 616 - DNA, 20 bp, synthetic construct
  misc_feature 1..20: note = Synthetic construct
  source 1..20: mol_type = other DNA
ttcacctccagtatggaacc

SEQ ID NO: 617 - DNA, 20 bp, synthetic construct
  misc_feature 1..20: note = Synthetic construct
  source 1..20: mol_type = other DNA
tcacctccagtatggaacca

SEQ ID NO: 618 - DNA, 20 bp, synthetic construct
  misc_feature 1..20: note = Synthetic construct
  source 1..20: mol_type = other DNA
cacctccagtatggaaccac

SEQ ID NO: 619 - DNA, 20 bp, synthetic construct
  misc_feature 1..20: note = Synthetic construct
  source 1..20: mol_type = other DNA
acctccagtatggaaccacg

SEQ ID NO: 620 - DNA, 20 bp, synthetic construct
  misc_feature 1..20: note = Synthetic construct
  source 1..20: mol_type = other DNA
cctccagtatggaaccacgc

SEQ ID NO: 621 - DNA, 20 bp, synthetic construct
  misc_feature 1..20: note = Synthetic construct
  source 1..20: mol_type = other DNA
ctccagtatggaaccacgct

SEQ ID NO: 622 - DNA, 20 bp, synthetic construct
  misc_feature 1..20: note = Synthetic construct
  source 1..20: mol_type = other DNA
tccagtatggaaccacgcta

SEQ ID NO: 623 - DNA, 20 bp, synthetic construct
  misc_feature 1..20: note = Synthetic construct
  source 1..20: mol_type = other DNA
ccagtatggaaccacgctat

SEQ ID NO: 624 - DNA, 20 bp, synthetic construct
  misc_feature 1..20: note = Synthetic construct
  source 1..20: mol_type = other DNA
cagtatggaaccacgctatg

SEQ ID NO: 625 - DNA, 20 bp, synthetic construct
  misc_feature 1..20: note = Synthetic construct
  source 1..20: mol_type = other DNA
agtatggaaccacgctatgt

SEQ ID NO: 626 - DNA, 20 bp, synthetic construct
  misc_feature 1..20: note = Synthetic construct
  source 1..20: mol_type = other DNA
gtatggaaccacgctatgta

SEQ ID NO: 627 - DNA, 20 bp, synthetic construct
  misc_feature 1..20: note = Synthetic construct
  source 1..20: mol_type = other DNA
tatggaaccacgctatgtag

SEQ ID NO: 628 - DNA, 20 bp, synthetic construct
  misc_feature 1..20: note = Synthetic construct
  source 1..20: mol_type = other DNA
atggaaccacgctatgtagc

SEQ ID NO: 629 - DNA, 20 bp, synthetic construct
  misc_feature 1..20: note = Synthetic construct
  source 1..20: mol_type = other DNA
tggaaccacgctatgtagcg

SEQ ID NO: 630 - DNA, 20 bp, synthetic construct
  misc_feature 1..20: note = Synthetic construct
  source 1..20: mol_type = other DNA
ggaaccacgctatgtagcga

SEQ ID NO: 631 - DNA, 20 bp, synthetic construct
  misc_feature 1..20: note = Synthetic construct
  source 1..20: mol_type = other DNA
gaaccacgctatgtagcgac

SEQ ID NO: 632 - DNA, 20 bp, synthetic construct
  misc_feature 1..20: note = Synthetic construct
  source 1..20: mol_type = other DNA
aaccacgctatgtagcgacc

SEQ ID NO: 633 - DNA, 20 bp, synthetic construct
  misc_feature 1..20: note = Synthetic construct
  source 1..20: mol_type = other DNA
accacgctatgtagcgacca

SEQ ID NO: 634 - DNA, 20 bp, synthetic construct
  misc_feature 1..20: note = Synthetic construct
  source 1..20: mol_type = other DNA
ccacgctatgtagcgaccac

SEQ ID NO: 635 - DNA, 20 bp, synthetic construct
  misc_feature 1..20: note = Synthetic construct
  source 1..20: mol_type = other DNA
cacgctatgtagcgaccact

SEQ ID NO: 636 - DNA, 20 bp, synthetic construct
  misc_feature 1..20: note = Synthetic construct
  source 1..20: mol_type = other DNA
acgctatgtagcgaccactg

SEQ ID NO: 637 - DNA, 20 bp, synthetic construct
  misc_feature 1..20: note = Synthetic construct
  source 1..20: mol_type = other DNA
cgctatgtagcgaccactgt

SEQ ID NO: 638 - DNA, 20 bp, synthetic construct
  misc_feature 1..20: note = Synthetic construct
  source 1..20: mol_type = other DNA
gctatgtagcgaccactgtc

SEQ ID NO: 639 - DNA, 20 bp, synthetic construct
  misc_feature 1..20: note = Synthetic construct
  source 1..20: mol_type = other DNA
ctatgtagcgaccactgtcg

SEQ ID NO: 640 - DNA, 20 bp, synthetic construct
  misc_feature 1..20: note = Synthetic construct
  source 1..20: mol_type = other DNA
tatgtagcgaccactgtcgt

SEQ ID NO: 641 - DNA, 20 bp, synthetic construct
  misc_feature 1..20: note = Synthetic construct
  source 1..20: mol_type = other DNA
atgtagcgaccactgtcgtg

SEQ ID NO: 642 - DNA, 20 bp, synthetic construct
  misc_feature 1..20: note = Synthetic construct
  source 1..20: mol_type = other DNA
tgtagcgaccactgtcgtgc

SEQ ID NO: 643 - DNA, 20 bp, synthetic construct
  misc_feature 1..20: note = Synthetic construct
  source 1..20: mol_type = other DNA
gtagcgaccactgtcgtgct

SEQ ID NO: 644 - DNA, 20 bp, synthetic construct
  misc_feature 1..20: note = Synthetic construct
  source 1..20: mol_type = other DNA
tagcgaccactgtcgtgctt

SEQ ID NO: 645 - DNA, 20 bp, synthetic construct
  misc_feature 1..20: note = Synthetic construct
  source 1..20: mol_type = other DNA
agcgaccactgtcgtgcttt

SEQ ID NO: 646 - DNA, 20 bp, synthetic construct
  misc_feature 1..20: note = Synthetic construct
  source 1..20: mol_type = other DNA
gcgaccactgtcgtgctttt

SEQ ID NO: 647 - DNA, 20 bp, synthetic construct
  misc_feature 1..20: note = Synthetic construct
  source 1..20: mol_type = other DNA
cgaccactgtcgtgcttttc

SEQ ID NO: 648 - DNA, 20 bp, synthetic construct
  misc_feature 1..20: note = Synthetic construct
  source 1..20: mol_type = other DNA
gaccactgtcgtgcttttcg

SEQ ID NO: 649 - DNA, 20 bp, synthetic construct
  misc_feature 1..20: note = Synthetic construct
  source 1..20: mol_type = other DNA
accactgtcgtgcttttcgc

SEQ ID NO: 650 - DNA, 20 bp, synthetic construct
  misc_feature 1..20: note = Synthetic construct
  source 1..20: mol_type = other DNA
ccactgtcgtgcttttcgct

SEQ ID NO: 651 - DNA, 20 bp, synthetic construct
  misc_feature 1..20: note = Synthetic construct
  source 1..20: mol_type = other DNA
cactgtcgtgcttttcgctg

SEQ ID NO: 652 - DNA, 20 bp, synthetic construct
  misc_feature 1..20: note = Synthetic construct
  source 1..20: mol_type = other DNA
actgtcgtgcttttcgctga

SEQ ID NO: 653 - DNA, 20 bp, synthetic construct
  misc_feature 1..20: note = Synthetic construct
  source 1..20: mol_type = other DNA
ctgtcgtgcttttcgctgaa

SEQ ID NO: 654 - DNA, 20 bp, synthetic construct
  misc_feature 1..20: note = Synthetic construct
  source 1..20: mol_type = other DNA
tgtcgtgcttttcgctgaag

SEQ ID NO: 655 - DNA, 20 bp, synthetic construct
  misc_feature 1..20: note = Synthetic construct
  source 1..20: mol_type = other DNA
gtcgtgcttttcgctgaaga

SEQ ID NO: 656 - DNA, 20 bp, synthetic construct
  misc_feature 1..20: note = Synthetic construct
  source 1..20: mol_type = other DNA
tcgtgcttttcgctgaagaa

SEQ ID NO: 657 - DNA, 20 bp, synthetic construct
  misc_feature 1..20: note = Synthetic construct
  source 1..20: mol_type = other DNA
cgtgcttttcgctgaagaac

SEQ ID NO: 658 - DNA, 20 bp, synthetic construct
  misc_feature 1..20: note = Synthetic construct
  source 1..20: mol_type = other DNA
gtgcttttcgctgaagaact

SEQ ID NO: 659 - DNA, 20 bp, synthetic construct
  misc_feature 1..20: note = Synthetic construct
  source 1..20: mol_type = other DNA
tgcttttcgctgaagaactt

SEQ ID NO: 660 - DNA, 20 bp, synthetic construct
  misc_feature 1..20: note = Synthetic construct
  source 1..20: mol_type = other DNA
gcttttcgctgaagaacttg

SEQ ID NO: 661 - DNA, 20 bp, synthetic construct
  misc_feature 1..20: note = Synthetic construct
  source 1..20: mol_type = other DNA
cttttcgctgaagaacttgc

SEQ ID NO: 662 - DNA, 20 bp, synthetic construct
  misc_feature 1..20: note = Synthetic construct
  source 1..20: mol_type = other DNA
ttttcgctgaagaacttgcg

SEQ ID NO: 663 - DNA, 20 bp, synthetic construct
  misc_feature 1..20: note = Synthetic construct
  source 1..20: mol_type = other DNA
tttcgctgaagaacttgcgt

SEQ ID NO: 664 - DNA, 20 bp, synthetic construct
  misc_feature 1..20: note = Synthetic construct
  source 1..20: mol_type = other DNA
ttcgctgaagaacttgcgtt

SEQ ID NO: 665 - DNA, 20 bp, synthetic construct
  misc_feature 1..20: note = Synthetic construct
  source 1..20: mol_type = other DNA
tcgctgaagaacttgcgttc

SEQ ID NO: 666 - DNA, 20 bp, synthetic construct
  misc_feature 1..20: note = Synthetic construct
  source 1..20: mol_type = other DNA
cgctgaagaacttgcgttct

SEQ ID NO: 667 - DNA, 20 bp, synthetic construct
  misc_feature 1..20: note = Synthetic construct
  source 1..20: mol_type = other DNA
gctgaagaacttgcgttctc

SEQ ID NO: 668 - DNA, 20 bp, synthetic construct
  misc_feature 1..20: note = Synthetic construct
  source 1..20: mol_type = other DNA
ctgaagaacttgcgttctcg

SEQ ID NO: 669 - DNA, 20 bp, synthetic construct
  misc_feature 1..20: note = Synthetic construct
  source 1..20: mol_type = other DNA
tgaagaacttgcgttctcga

SEQ ID NO: 670 - DNA, 20 bp, synthetic construct
  misc_feature 1..20: note = Synthetic construct
  source 1..20: mol_type = other DNA
gaagaacttgcgttctcgag

SEQ ID NO: 671 - DNA, 20 bp, synthetic construct
  misc_feature 1..20: note = Synthetic construct
  source 1..20: mol_type = other DNA
aagaacttgcgttctcgagc

SEQ ID NO: 672 - DNA, 20 bp, synthetic construct
  misc_feature 1..20: note = Synthetic construct
  source 1..20: mol_type = other DNA
agaacttgcgttctcgagcg

SEQ ID NO: 673 - DNA, 20 bp, synthetic construct
  misc_feature 1..20: note = Synthetic construct
  source 1..20: mol_type = other DNA
gaacttgcgttctcgagcga

SEQ ID NO: 674 - DNA, 20 bp, synthetic construct
  misc_feature 1..20: note = Synthetic construct
  source 1..20: mol_type = other DNA
aacttgcgttctcgagcgat

SEQ ID NO: 675 - DNA, 20 bp, synthetic construct
  misc_feature 1..20: note = Synthetic construct
  source 1..20: mol_type = other DNA
acttgcgttctcgagcgata

SEQ ID NO: 676 - DNA, 20 bp, synthetic construct
  misc_feature 1..20: note = Synthetic construct
  source 1..20: mol_type = other DNA
cttgcgttctcgagcgatac

SEQ ID NO: 677 - DNA, 20 bp, synthetic construct
  misc_feature 1..20: note = Synthetic construct
  source 1..20: mol_type = other DNA
ttgcgttctcgagcgatacg

SEQ ID NO: 678 - DNA, 20 bp, synthetic construct
  misc_feature 1..20: note = Synthetic construct
  source 1..20: mol_type = other DNA
tgcgttctcgagcgatacga

SEQ ID NO: 679 - DNA, 20 bp, synthetic construct
  misc_feature 1..20: note = Synthetic construct
  source 1..20: mol_type = other DNA
gcgttctcgagcgatacgag

SEQ ID NO: 680 - DNA, 20 bp, synthetic construct
  misc_feature 1..20: note = Synthetic construct
  source 1..20: mol_type = other DNA
cgttctcgagcgatacgagc

SEQ ID NO: 681 - DNA, 20 bp, synthetic construct
  misc_feature 1..20: note = Synthetic construct
  source 1..20: mol_type = other DNA
gttctcgagcgatacgagca

SEQ ID NO: 682 - DNA, 20 bp, synthetic construct
  misc_feature 1..20: note = Synthetic construct
  source 1..20: mol_type = other DNA
ttctcgagcgatacgagcaa

SEQ ID NO: 683 - DNA, 20 bp, synthetic construct
  misc_feature 1..20: note = Synthetic construct
  source 1..20: mol_type = other DNA
tctcgagcgatacgagcaag

SEQ ID NO: 684 - DNA, 20 bp, synthetic construct
  misc_feature 1..20: note = Synthetic construct
  source 1..20: mol_type = other DNA
ctcgagcgatacgagcaaga

SEQ ID NO: 685 - DNA, 20 bp, synthetic construct
  misc_feature 1..20: note = Synthetic construct
  source 1..20: mol_type = other DNA
tcgagcgatacgagcaagac

SEQ ID NO: 686 - DNA, 20 bp, synthetic construct
  misc_feature 1..20: note = Synthetic construct
  source 1..20: mol_type = other DNA
cgagcgatacgagcaagacg

SEQ ID NO: 687 - DNA, 20 bp, synthetic construct
  misc_feature 1..20: note = Synthetic construct
  source 1..20: mol_type = other DNA
gagcgatacgagcaagacgg

SEQ ID NO: 688 - DNA, 20 bp, synthetic construct
  misc_feature 1..20: note = Synthetic construct
  source 1..20: mol_type = other DNA
agcgatacgagcaagacgga

SEQ ID NO: 689 - DNA, 20 bp, synthetic construct
  misc_feature 1..20: note = Synthetic construct
  source 1..20: mol_type = other DNA
gcgatacgagcaagacggaa

SEQ ID NO: 690 - DNA, 20 bp, synthetic construct
  misc_feature 1..20: note = Synthetic construct
  source 1..20: mol_type = other DNA
cgatacgagcaagacggaaa

SEQ ID NO: 691 - DNA, 20 bp, synthetic construct
  misc_feature 1..20: note = Synthetic construct
  source 1..20: mol_type = other DNA
gatacgagcaagacggaaac

SEQ ID NO: 692 - DNA, 20 bp, synthetic construct
  misc_feature 1..20: note = Synthetic construct
  source 1..20: mol_type = other DNA
atacgagcaagacggaaacc

SEQ ID NO: 693 - DNA, 20 bp, synthetic construct
  misc_feature 1..20: note = Synthetic construct
  source 1..20: mol_type = other DNA
tacgagcaagacggaaaccc

SEQ ID NO: 694 - DNA, 20 bp, synthetic construct
  misc_feature 1..20: note = Synthetic construct
  source 1..20: mol_type = other DNA
acgagcaagacggaaacccg

SEQ ID NO: 695 - DNA, 20 bp, synthetic construct
  misc_feature 1..20: note = Synthetic construct
  source 1..20: mol_type = other DNA
cgagcaagacggaaacccga

SEQ ID NO: 696 - DNA, 20 bp, synthetic construct
  misc_feature 1..20: note = Synthetic construct
  source 1..20: mol_type = other DNA
gagcaagacggaaacccgag

SEQ ID NO: 697 - DNA, 20 bp, synthetic construct
  misc_feature 1..20: note = Synthetic construct
  source 1..20: mol_type = other DNA
agcaagacggaaacccgagg

SEQ ID NO: 698 - DNA, 20 bp, synthetic construct
  misc_feature 1..20: note = Synthetic construct
  source 1..20: mol_type = other DNA
gcaagacggaaacccgaggt

SEQ ID NO: 699 - DNA, 20 bp, synthetic construct
  misc_feature 1..20: note = Synthetic construct
  source 1..20: mol_type = other DNA
caagacggaaacccgaggta

SEQ ID NO: 700 - DNA, 20 bp, synthetic construct
  misc_feature 1..20: note = Synthetic construct
  source 1..20: mol_type = other DNA
aagacggaaacccgaggtac

SEQ ID NO: 701 - DNA, 20 bp, synthetic construct
  misc_feature 1..20: note = Synthetic construct
  source 1..20: mol_type = other DNA
agacggaaacccgaggtacg

SEQ ID NO: 702 - DNA, 20 bp, synthetic construct
  misc_feature 1..20: note = Synthetic construct
  source 1..20: mol_type = other DNA
gacggaaacccgaggtacgg

SEQ ID NO: 703 - DNA, 20 bp, synthetic construct
  misc_feature 1..20: note = Synthetic construct
  source 1..20: mol_type = other DNA
acggaaacccgaggtacggg

SEQ ID NO: 704 - DNA, 20 bp, synthetic construct
  misc_feature 1..20: note = Synthetic construct
  source 1..20: mol_type = other DNA
cggaaacccgaggtacgggt

SEQ ID NO: 705 - DNA, 20 bp, synthetic construct
  misc_feature 1..20: note = Synthetic construct
  source 1..20: mol_type = other DNA
ggaaacccgaggtacgggta

SEQ ID NO: 706 - DNA, 20 bp, synthetic construct
  misc_feature 1..20: note = Synthetic construct
  source 1..20: mol_type = other DNA
gaaacccgaggtacgggtat

SEQ ID NO: 707 - DNA, 20 bp, synthetic construct
  misc_feature 1..20: note = Synthetic construct
  source 1..20: mol_type = other DNA
aaacccgaggtacgggtatc

SEQ ID NO: 708 - DNA, 20 bp, synthetic construct
  misc_feature 1..20: note = Synthetic construct
  source 1..20: mol_type = other DNA
aacccgaggtacgggtatcc

SEQ ID NO: 709 - DNA, 20 bp, synthetic construct
  misc_feature 1..20: note = Synthetic construct
  source 1..20: mol_type = other DNA
acccgaggtacgggtatccg

SEQ ID NO: 710 - DNA, 20 bp, synthetic construct
  misc_feature 1..20: note = Synthetic construct
  source 1..20: mol_type = other DNA
cccgaggtacgggtatccgc

SEQ ID NO: 711 - DNA, 20 bp, synthetic construct
  misc_feature 1..20: note = Synthetic construct
  source 1..20: mol_type = other DNA
ccgaggtacgggtatccgcg

SEQ ID NO: 712 - DNA, 20 bp, synthetic construct
  misc_feature 1..20: note = Synthetic construct
  source 1..20: mol_type = other DNA
cgaggtacgggtatccgcga

SEQ ID NO: 713 - DNA, 20 bp, synthetic construct
  misc_feature 1..20: note = Synthetic construct
  source 1..20: mol_type = other DNA
gaggtacgggtatccgcgag

SEQ ID NO: 714 - DNA, 20 bp, synthetic construct
  misc_feature 1..20: note = Synthetic construct
  source 1..20: mol_type = other DNA
aggtacgggtatccgcgagc

SEQ ID NO: 715 - DNA, 20 bp, synthetic construct
  misc_feature 1..20: note = Synthetic construct
  source 1..20: mol_type = other DNA
ggtacgggtatccgcgagca

SEQ ID NO: 716 - DNA, 20 bp, synthetic construct
  misc_feature 1..20: note = Synthetic construct
  source 1..20: mol_type = other DNA
gtacgggtatccgcgagcag

SEQ ID NO: 717 - DNA, 20 bp, synthetic construct
  misc_feature 1..20: note = Synthetic construct
  source 1..20: mol_type = other DNA
tacgggtatccgcgagcagc

SEQ ID NO: 718 - DNA, 20 bp, synthetic construct
  misc_feature 1..20: note = Synthetic construct
  source 1..20: mol_type = other DNA
acgggtatccgcgagcagcc

SEQ ID NO: 719 - DNA, 20 bp, synthetic construct
  misc_feature 1..20: note = Synthetic construct
  source 1..20: mol_type = other DNA
cgggtatccgcgagcagccg

SEQ ID NO: 720 - DNA, 20 bp, synthetic construct
  misc_feature 1..20: note = Synthetic construct
  source 1..20: mol_type = other DNA
gggtatccgcgagcagccgc

SEQ ID NO: 721 - DNA, 20 bp, synthetic construct
  misc_feature 1..20: note = Synthetic construct
  source 1..20: mol_type = other DNA
ggtatccgcgagcagccgcc

SEQ ID NO: 722 - DNA, 20 bp, synthetic construct
  misc_feature 1..20: note = Synthetic construct
  source 1..20: mol_type = other DNA
gtatccgcgagcagccgccc

SEQ ID NO: 723 - DNA, 20 bp, synthetic construct
  misc_feature 1..20: note = Synthetic construct
  source 1..20: mol_type = other DNA
tatccgcgagcagccgcccg

SEQ ID NO: 724 - DNA, 20 bp, synthetic construct
  misc_feature 1..20: note = Synthetic construct
  source 1..20: mol_type = other DNA
atccgcgagcagccgcccgt

SEQ ID NO: 725 - DNA, 20 bp, synthetic construct
  misc_feature 1..20: note = Synthetic construct
  source 1..20: mol_type = other DNA
tccgcgagcagccgcccgta

SEQ ID NO: 726 - DNA, 20 bp, synthetic construct
  misc_feature 1..20: note = Synthetic construct
  source 1..20: mol_type = other DNA
ccgcgagcagccgcccgtac

SEQ ID NO: 727 - DNA, 20 bp, synthetic construct
  misc_feature 1..20: note = Synthetic construct
  source 1..20: mol_type = other DNA
cgcgagcagccgcccgtacg

SEQ ID NO: 728 - DNA, 20 bp, synthetic construct
  misc_feature 1..20: note = Synthetic construct
  source 1..20: mol_type = other DNA
gcgagcagccgcccgtacgg

SEQ ID NO: 729 - DNA, 20 bp, synthetic construct
  misc_feature 1..20: note = Synthetic construct
  source 1..20: mol_type = other DNA
cgagcagccgcccgtacgga

SEQ ID NO: 730 - DNA, 20 bp, synthetic construct
  misc_feature 1..20: note = Synthetic construct
  source 1..20: mol_type = other DNA
gagcagccgcccgtacggag

SEQ ID NO: 731 - DNA, 20 bp, synthetic construct
  misc_feature 1..20: note = Synthetic construct
  source 1..20: mol_type = other DNA
agcagccgcccgtacggagt

SEQ ID NO: 732 - DNA, 20 bp, synthetic construct
  misc_feature 1..20: note = Synthetic construct
  source 1..20: mol_type = other DNA
gcagccgcccgtacggagtc

SEQ ID NO: 733 - DNA, 20 bp, synthetic construct
  misc_feature 1..20: note = Synthetic construct
  source 1..20: mol_type = other DNA
cagccgcccgtacggagtct

SEQ ID NO: 734 - DNA, 20 bp, synthetic construct
  misc_feature 1..20: note = Synthetic construct
  source 1..20: mol_type = other DNA
agccgcccgtacggagtctt

SEQ ID NO: 735 - DNA, 20 bp, synthetic construct
  misc_feature 1..20: note = Synthetic construct
  source 1..20: mol_type = other DNA
gccgcccgtacggagtcttg

SEQ ID NO: 736 - DNA, 20 bp, synthetic construct
  misc_feature 1..20: note = Synthetic construct
  source 1..20: mol_type = other DNA
ccgcccgtacggagtcttgg

SEQ ID NO: 737 - DNA, 20 bp, synthetic construct
  misc_feature 1..20: note = Synthetic construct
  source 1..20: mol_type = other DNA
cgcccgtacggagtcttggt

SEQ ID NO: 738 - DNA, 20 bp, synthetic construct
  misc_feature 1..20: note = Synthetic construct
  source 1..20: mol_type = other DNA
gcccgtacggagtcttggtg

SEQ ID NO: 739 - DNA, 20 bp, synthetic construct
  misc_feature 1..20: note = Synthetic construct
  source 1..20: mol_type = other DNA
cccgtacggagtcttggtgt

SEQ ID NO: 740 - DNA, 20 bp, synthetic construct
  misc_feature 1..20: note = Synthetic construct
  source 1..20: mol_type = other DNA
ccgtacggagtcttggtgta

SEQ ID NO: 741 - DNA, 20 bp, synthetic construct
  misc_feature 1..20: note = Synthetic construct
  source 1..20: mol_type = other DNA
cgtacggagtcttggtgtat

SEQ ID NO: 742 - DNA, 20 bp, synthetic construct
  misc_feature 1..20: note = Synthetic construct
  source 1..20: mol_type = other DNA
gtacggagtcttggtgtata

SEQ ID NO: 743 - DNA, 20 bp, synthetic construct
  misc_feature 1..20: note = Synthetic construct
  source 1..20: mol_type = other DNA
tacggagtcttggtgtatac

SEQ ID NO: 744 - DNA, 20 bp, synthetic construct
  misc_feature 1..20: note = Synthetic construct
  source 1..20: mol_type = other DNA
acggagtcttggtgtatacc

SEQ ID NO: 745 - DNA, 20 bp, synthetic construct
  misc_feature 1..20: note = Synthetic construct
  source 1..20: mol_type = other DNA
cggagtcttggtgtataccg

SEQ ID NO: 746 - DNA, 20 bp, synthetic construct
  misc_feature 1..20: note = Synthetic construct
  source 1..20: mol_type = other DNA
ggagtcttggtgtataccga

SEQ ID NO: 747 - DNA, 20 bp, synthetic construct
  misc_feature 1..20: note = Synthetic construct
  source 1..20: mol_type = other DNA
gagtcttggtgtataccgag

SEQ ID NO: 748 - DNA, 20 bp, synthetic construct
  misc_feature 1..20: note = Synthetic construct
  source 1..20: mol_type = other DNA
agtcttggtgtataccgaga

SEQ ID NO: 749 - DNA, 20 bp, synthetic construct
  misc_feature 1..20: note = Synthetic construct
  source 1..20: mol_type = other DNA
gtcttggtgtataccgagac

SEQ ID NO: 750 - DNA, 20 bp, synthetic construct
  misc_feature 1..20: note = Synthetic construct
  source 1..20: mol_type = other DNA
tcttggtgtataccgagact

SEQ ID NO: 751 - DNA, 20 bp, synthetic construct
  misc_feature 1..20: note = Synthetic construct
  source 1..20: mol_type = other DNA
cttggtgtataccgagactg

SEQ ID NO: 752 - DNA, 20 bp, synthetic construct
  misc_feature 1..20: note = Synthetic construct
  source 1..20: mol_type = other DNA
ttggtgtataccgagactgc

SEQ ID NO: 753 - DNA, 20 bp, synthetic construct
  misc_feature 1..20: note = Synthetic construct
  source 1..20: mol_type = other DNA
tggtgtataccgagactgcc

SEQ ID NO: 754 - DNA, 20 bp, synthetic construct
  misc_feature 1..20: note = Synthetic construct
  source 1..20: mol_type = other DNA
ggtgtataccgagactgccg

SEQ ID NO: 755 - DNA, 20 bp, synthetic construct
  misc_feature 1..20: note = Synthetic construct
  source 1..20: mol_type = other DNA
gtgtataccgagactgccgt

SEQ ID NO: 756 - DNA, 20 bp, synthetic construct
  misc_feature 1..20: note = Synthetic construct
  source 1..20: mol_type = other DNA
tgtataccgagactgccgta

SEQ ID NO: 757 - DNA, 20 bp, synthetic construct
  misc_feature 1..20: note = Synthetic construct
  source 1..20: mol_type = other DNA
gtataccgagactgccgtag

SEQ ID NO: 758 - DNA, 20 bp, synthetic construct
  misc_feature 1..20: note = Synthetic construct
  source 1..20: mol_type = other DNA
tataccgagactgccgtagg

SEQ ID NO: 759 - DNA, 20 bp, synthetic construct
  misc_feature 1..20: note = Synthetic construct
  source 1..20: mol_type = other DNA
ataccgagactgccgtaggc

SEQ ID NO: 760 - DNA, 20 bp, synthetic construct
  misc_feature 1..20: note = Synthetic construct
  source 1..20: mol_type = other DNA
taccgagactgccgtaggcg

SEQ ID NO: 761 - DNA, 20 bp, synthetic construct
  misc_feature 1..20: note = Synthetic construct
  source 1..20: mol_type = other DNA
accgagactgccgtaggcgg

SEQ ID NO: 762 - DNA, 20 bp, synthetic construct
  misc_feature 1..20: note = Synthetic construct
  source 1..20: mol_type = other DNA
ccgagactgccgtaggcggg

SEQ ID NO: 763 - DNA, 20 bp, synthetic construct
  misc_feature 1..20: note = Synthetic construct
  source 1..20: mol_type = other DNA
cgagactgccgtaggcgggc

SEQ ID NO: 764 - DNA, 20 bp, synthetic construct
  misc_feature 1..20: note = Synthetic construct
  source 1..20: mol_type = other DNA
gagactgccgtaggcgggct

SEQ ID NO: 765 - DNA, 20 bp, synthetic construct
  misc_feature 1..20: note = Synthetic construct
  source 1..20: mol_type = other DNA
agactgccgtaggcgggctg

SEQ ID NO: 766 - DNA, 20 bp, synthetic construct
  misc_feature 1..20: note = Synthetic construct
  source 1..20: mol_type = other DNA
gactgccgtaggcgggctga

SEQ ID NO: 767 - DNA, 20 bp, synthetic construct
  misc_feature 1..20: note = Synthetic construct
  source 1..20: mol_type = other DNA
actgccgtaggcgggctgac

SEQ ID NO: 768 - DNA, 20 bp, synthetic construct
  misc_feature 1..20: note = Synthetic construct
  source 1..20: mol_type = other DNA
ctgccgtaggcgggctgact

SEQ ID NO: 769 - DNA, 20 bp, synthetic construct
  misc_feature 1..20: note = Synthetic construct
  source 1..20: mol_type = other DNA
tgccgtaggcgggctgacta

SEQ ID NO: 770 - DNA, 20 bp, synthetic construct
  misc_feature 1..20: note = Synthetic construct
  source 1..20: mol_type = other DNA
gccgtaggcgggctgactac

SEQ ID NO: 771 - DNA, 20 bp, synthetic construct
  misc_feature 1..20: note = Synthetic construct
  source 1..20: mol_type = other DNA
ccgtaggcgggctgactacg

SEQ ID NO: 772 - DNA, 20 bp, synthetic construct
  misc_feature 1..20: note = Synthetic construct
  source 1..20: mol_type = other DNA
cgtaggcgggctgactacgt

SEQ ID NO: 773 - DNA, 20 bp, synthetic construct
  misc_feature 1..20: note = Synthetic construct
  source 1..20: mol_type = other DNA
gtaggcgggctgactacgta

SEQ ID NO: 774 - DNA, 20 bp, synthetic construct
  misc_feature 1..20: note = Synthetic construct
  source 1..20: mol_type = other DNA
taggcgggctgactacgtag

SEQ ID NO: 775 - DNA, 20 bp, synthetic construct
  misc_feature 1..20: note = Synthetic construct
  source 1..20: mol_type = other DNA
aggcgggctgactacgtagt

SEQ ID NO: 776 - DNA, 20 bp, synthetic construct
  misc_feature 1..20: note = Synthetic construct
  source 1..20: mol_type = other DNA
ggcgggctgactacgtagta

SEQ ID NO: 777 - DNA, 20 bp, synthetic construct
  misc_feature 1..20: note = Synthetic construct
  source 1..20: mol_type = other DNA
gcgggctgactacgtagtag

SEQ ID NO: 778 - DNA, 20 bp, synthetic construct
  misc_feature 1..20: note = Synthetic construct
  source 1..20: mol_type = other DNA
cgggctgactacgtagtagt

SEQ ID NO: 779 - DNA, 20 bp, synthetic construct
  misc_feature 1..20: note = Synthetic construct
  source 1..20: mol_type = other DNA
gggctgactacgtagtagtc

SEQ ID NO: 780 - DNA, 20 bp, synthetic construct
  misc_feature 1..20: note = Synthetic construct
  source 1..20: mol_type = other DNA
ggctgactacgtagtagtcg

SEQ ID NO: 781 - DNA, 20 bp, synthetic construct
  misc_feature 1..20: note = Synthetic construct
  source 1..20: mol_type = other DNA
gctgactacgtagtagtcgg

SEQ ID NO: 782 - DNA, 20 bp, synthetic construct
  misc_feature 1..20: note = Synthetic construct
  source 1..20: mol_type = other DNA
ctgactacgtagtagtcggc

SEQ ID NO: 783 - DNA, 20 bp, synthetic construct
  misc_feature 1..20: note = Synthetic construct
  source 1..20: mol_type = other DNA
tgactacgtagtagtcggca

SEQ ID NO: 784 - DNA, 20 bp, synthetic construct
  misc_feature 1..20: note = Synthetic construct
  source 1..20: mol_type = other DNA
gactacgtagtagtcggcag

SEQ ID NO: 785 - DNA, 20 bp, synthetic construct
  misc_feature 1..20: note = Synthetic construct
  source 1..20: mol_type = other DNA
actacgtagtagtcggcagc

SEQ ID NO: 786 - DNA, 20 bp, synthetic construct
  misc_feature 1..20: note = Synthetic construct
  source 1..20: mol_type = other DNA
ctacgtagtagtcggcagcg

SEQ ID NO: 787 - DNA, 20 bp, synthetic construct
  misc_feature 1..20: note = Synthetic construct
  source 1..20: mol_type = other DNA
tacgtagtagtcggcagcga

SEQ ID NO: 788 - DNA, 20 bp, synthetic construct
  misc_feature 1..20: note = Synthetic construct
  source 1..20: mol_type = other DNA
acgtagtagtcggcagcgag

SEQ ID NO: 789 - DNA, 20 bp, synthetic construct
  misc_feature 1..20: note = Synthetic construct
  source 1..20: mol_type = other DNA
cgtagtagtcggcagcgagg

SEQ ID NO: 790 - DNA, 20 bp, synthetic construct
  misc_feature 1..20: note = Synthetic construct
  source 1..20: mol_type = other DNA
gtagtagtcggcagcgaggt

SEQ ID NO: 791 - DNA, 20 bp, synthetic construct
  misc_feature 1..20: note = Synthetic construct
  source 1..20: mol_type = other DNA
tagtagtcggcagcgaggtc

SEQ ID NO: 792 - DNA, 20 bp, synthetic construct
  misc_feature 1..20: note = Synthetic construct
  source 1..20: mol_type = other DNA
agtagtcggcagcgaggtcc

SEQ ID NO: 793 - DNA, 20 bp, synthetic construct
  misc_feature 1..20: note = Synthetic construct
  source 1..20: mol_type = other DNA
gtagtcggcagcgaggtccg

SEQ ID NO: 794 - DNA, 20 bp, synthetic construct
  misc_feature 1..20: note = Synthetic construct
  source 1..20: mol_type = other DNA
tagtcggcagcgaggtccgt

SEQ ID NO: 795 - DNA, 20 bp, synthetic construct
  misc_feature 1..20: note = Synthetic construct
  source 1..20: mol_type = other DNA
agtcggcagcgaggtccgtc

SEQ ID NO: 796 - DNA, 20 bp, synthetic construct
  misc_feature 1..20: note = Synthetic construct
  source 1..20: mol_type = other DNA
gtcggcagcgaggtccgtcc

SEQ ID NO: 797 - DNA, 20 bp, synthetic construct
  misc_feature 1..20: note = Synthetic construct
  source 1..20: mol_type = other DNA
tcggcagcgaggtccgtccc

SEQ ID NO: 798 - DNA, 20 bp, synthetic construct
  misc_feature 1..20: note = Synthetic construct
  source 1..20: mol_type = other DNA
cggcagcgaggtccgtccca

SEQ ID NO: 799 - DNA, 20 bp, synthetic construct
  misc_feature 1..20: note = Synthetic construct
  source 1..20: mol_type = other DNA
ggcagcgaggtccgtcccac

SEQ ID NO: 800 - DNA, 20 bp, synthetic construct
  misc_feature 1..20: note = Synthetic construct
  source 1..20: mol_type = other DNA
gcagcgaggtccgtcccacc

SEQ ID NO: 801 - DNA, 20 bp, synthetic construct
  misc_feature 1..20: note = Synthetic construct
  source 1..20: mol_type = other DNA
cagcgaggtccgtcccaccg

SEQ ID NO: 802 - DNA, 20 bp, synthetic construct
  misc_feature 1..20: note = Synthetic construct
  source 1..20: mol_type = other DNA
agcgaggtccgtcccaccga

SEQ ID NO: 803 - DNA, 20 bp, synthetic construct
  misc_feature 1..20: note = Synthetic construct
  source 1..20: mol_type = other DNA
gcgaggtccgtcccaccgaa

SEQ ID NO: 804 - DNA, 20 bp, synthetic construct
  misc_feature 1..20: note = Synthetic construct
  source 1..20: mol_type = other DNA
cgaggtccgtcccaccgaag

SEQ ID NO: 805 - DNA, 20 bp, synthetic construct
  misc_feature 1..20: note = Synthetic construct
  source 1..20: mol_type = other DNA
gaggtccgtcccaccgaaga

SEQ ID NO: 806 - DNA, 20 bp, synthetic construct
  misc_feature 1..20: note = Synthetic construct
  source 1..20: mol_type = other DNA
aggtccgtcccaccgaagaa

SEQ ID NO: 807 - DNA, 20 bp, synthetic construct
  misc_feature 1..20: note = Synthetic construct
  source 1..20: mol_type = other DNA
ggtccgtcccaccgaagaac

SEQ ID NO: 808 - DNA, 20 bp, synthetic construct
  misc_feature 1..20: note = Synthetic construct
  source 1..20: mol_type = other DNA
gtccgtcccaccgaagaaca

SEQ ID NO: 809 - DNA, 20 bp, synthetic construct
  misc_feature 1..20: note = Synthetic construct
  source 1..20: mol_type = other DNA
tccgtcccaccgaagaacat

SEQ ID NO: 810 - DNA, 20 bp, synthetic construct
  misc_feature 1..20: note = Synthetic construct
  source 1..20: mol_type = other DNA
ccgtcccaccgaagaacatc

SEQ ID NO: 811 - DNA, 20 bp, synthetic construct
  misc_feature 1..20: note = Synthetic construct
  source 1..20: mol_type = other DNA
cgtcccaccgaagaacatcg

SEQ ID NO: 812 - DNA, 20 bp, synthetic construct
  misc_feature 1..20: note = Synthetic construct
  source 1..20: mol_type = other DNA
gtcccaccgaagaacatcga

SEQ ID NO: 813 - DNA, 20 bp, synthetic construct
  misc_feature 1..20: note = Synthetic construct
  source 1..20: mol_type = other DNA
tcccaccgaagaacatcgaa

SEQ ID NO: 814 - DNA, 20 bp, synthetic construct
  misc_feature 1..20: note = Synthetic construct
  source 1..20: mol_type = other DNA
cccaccgaagaacatcgaag

SEQ ID NO: 815 - DNA, 20 bp, synthetic construct
  misc_feature 1..20: note = Synthetic construct
  source 1..20: mol_type = other DNA
ccaccgaagaacatcgaagg

SEQ ID NO: 816 - DNA, 20 bp, synthetic construct
  misc_feature 1..20: note = Synthetic construct
  source 1..20: mol_type = other DNA
caccgaagaacatcgaaggc

SEQ ID NO: 817 - DNA, 20 bp, synthetic construct
  misc_feature 1..20: note = Synthetic construct
  source 1..20: mol_type = other DNA
accgaagaacatcgaaggca

SEQ ID NO: 818 - DNA, 20 bp, synthetic construct
  misc_feature 1..20: note = Synthetic construct
  source 1..20: mol_type = other DNA
ccgaagaacatcgaaggcac

SEQ ID NO: 819 - DNA, 20 bp, synthetic construct
  misc_feature 1..20: note = Synthetic construct
  source 1..20: mol_type = other DNA
cgaagaacatcgaaggcacc

SEQ ID NO: 820 - DNA, 20 bp, synthetic construct
  misc_feature 1..20: note = Synthetic construct
  source 1..20: mol_type = other DNA
gaagaacatcgaaggcacct

SEQ ID NO: 821 - DNA, 20 bp, synthetic construct
  misc_feature 1..20: note = Synthetic construct
  source 1..20: mol_type = other DNA
aagaacatcgaaggcacctg

SEQ ID NO: 822 - DNA, 20 bp, synthetic construct
  misc_feature 1..20: note = Synthetic construct
  source 1..20: mol_type = other DNA
agaacatcgaaggcacctgg

SEQ ID NO: 823 - DNA, 20 bp, synthetic construct
  misc_feature 1..20: note = Synthetic construct
  source 1..20: mol_type = other DNA
gaacatcgaaggcacctggg

SEQ ID NO: 824 - DNA, 20 bp, synthetic construct
  misc_feature 1..20: note = Synthetic construct
  source 1..20: mol_type = other DNA
aacatcgaaggcacctggga

SEQ ID NO: 825 - DNA, 20 bp, synthetic construct
  misc_feature 1..20: note = Synthetic construct
  source 1..20: mol_type = other DNA
acatcgaaggcacctgggag

SEQ ID NO: 826 - DNA, 20 bp, synthetic construct
  misc_feature 1..20: note = Synthetic construct
  source 1..20: mol_type = other DNA
catcgaaggcacctgggagg

SEQ ID NO: 827 - DNA, 20 bp, synthetic construct
  misc_feature 1..20: note = Synthetic construct
  source 1..20: mol_type = other DNA
atcgaaggcacctgggagga

SEQ ID NO: 828 - DNA, 20 bp, synthetic construct
  misc_feature 1..20: note = Synthetic construct
  source 1..20: mol_type = other DNA
tcgaaggcacctgggaggag

SEQ ID NO: 829 - DNA, 20 bp, synthetic construct
  misc_feature 1..20: note = Synthetic construct
  source 1..20: mol_type = other DNA
cgaaggcacctgggaggaga

SEQ ID NO: 830 - DNA, 20 bp, synthetic construct
  misc_feature 1..20: note = Synthetic construct
  source 1..20: mol_type = other DNA
gaaggcacctgggaggagag

SEQ ID NO: 831 - DNA, 20 bp, synthetic construct
  misc_feature 1..20: note = Synthetic construct
  source 1..20: mol_type = other DNA
aaggcacctgggaggagagc

SEQ ID NO: 832 - DNA, 20 bp, synthetic construct
  misc_feature 1..20: note = Synthetic construct
  source 1..20: mol_type = other DNA
aggcacctgggaggagagcc

SEQ ID NO: 833 - DNA, 20 bp, synthetic construct
  misc_feature 1..20: note = Synthetic construct
  source 1..20: mol_type = other DNA
ggcacctgggaggagagccg

SEQ ID NO: 834 - DNA, 20 bp, synthetic construct
  misc_feature 1..20: note = Synthetic construct
  source 1..20: mol_type = other DNA
gcacctgggaggagagccgt

SEQ ID NO: 835 - DNA, 20 bp, synthetic construct
  misc_feature 1..20: note = Synthetic construct
  source 1..20: mol_type = other DNA
cacctgggaggagagccgta

SEQ ID NO: 836 - DNA, 20 bp, synthetic construct
  misc_feature 1..20: note = Synthetic construct
  source 1..20: mol_type = other DNA
acctgggaggagagccgtac

SEQ ID NO: 837 - DNA, 20 bp, synthetic construct
  misc_feature 1..20: note = Synthetic construct
  source 1..20: mol_type = other DNA
cctgggaggagagccgtacc

SEQ ID NO: 838 - DNA, 20 bp, synthetic construct
  misc_feature 1..20: note = Synthetic construct
  source 1..20: mol_type = other DNA
ctgggaggagagccgtaccc

SEQ ID NO: 839 - DNA, 20 bp, synthetic construct
  misc_feature 1..20: note = Synthetic construct
  source 1..20: mol_type = other DNA
tgggaggagagccgtaccca

SEQ ID NO: 840 - DNA, 20 bp, synthetic construct
  misc_feature 1..20: note = Synthetic construct
  source 1..20: mol_type = other DNA
gggaggagagccgtacccac

SEQ ID NO: 841 - DNA, 20 bp, synthetic construct
  misc_feature 1..20: note = Synthetic construct
  source 1..20: mol_type = other DNA
ggaggagagccgtacccaca

SEQ ID NO: 842 - DNA, 20 bp, synthetic construct
  misc_feature 1..20: note = Synthetic construct
  source 1..20: mol_type = other DNA
gaggagagccgtacccacac

SEQ ID NO: 843 - DNA, 20 bp, synthetic construct
  misc_feature 1..20: note = Synthetic construct
  source 1..20: mol_type = other DNA
aggagagccgtacccacacc

SEQ ID NO: 844 - DNA, 20 bp, synthetic construct
  misc_feature 1..20: note = Synthetic construct
  source 1..20: mol_type = other DNA
ggagagccgtacccacacct

SEQ ID NO: 845 - DNA, 20 bp, synthetic construct
  misc_feature 1..20: note = Synthetic construct
  source 1..20: mol_type = other DNA
gagagccgtacccacacctt

SEQ ID NO: 846 - DNA, 20 bp, synthetic construct
  misc_feature 1..20: note = Synthetic construct
  source 1..20: mol_type = other DNA
agagccgtacccacacctta

SEQ ID NO: 847 - DNA, 20 bp, synthetic construct
  misc_feature 1..20: note = Synthetic construct
  source 1..20: mol_type = other DNA
gagccgtacccacaccttat

SEQ ID NO: 848 - DNA, 20 bp, synthetic construct
  misc_feature 1..20: note = Synthetic construct
  source 1..20: mol_type = other DNA
agccgtacccacaccttata

SEQ ID NO: 849 - DNA, 20 bp, synthetic construct
  misc_feature 1..20: note = Synthetic construct
  source 1..20: mol_type = other DNA
gccgtacccacaccttatag

SEQ ID NO: 850 - DNA, 20 bp, synthetic construct
  misc_feature 1..20: note = Synthetic construct
  source 1..20: mol_type = other DNA
ccgtacccacaccttataga

SEQ ID NO: 851 - DNA, 20 bp, synthetic construct
  misc_feature 1..20: note = Synthetic construct
  source 1..20: mol_type = other DNA
cgtacccacaccttatagag

SEQ ID NO: 852 - DNA, 20 bp, synthetic construct
  misc_feature 1..20: note = Synthetic construct
  source 1..20: mol_type = other DNA
gtacccacaccttatagagg

SEQ ID NO: 853 - DNA, 20 bp, synthetic construct
  misc_feature 1..20: note = Synthetic construct
  source 1..20: mol_type = other DNA
tacccacaccttatagaggc

SEQ ID NO: 854 - DNA, 20 bp, synthetic construct
  misc_feature 1..20: note = Synthetic construct
  source 1..20: mol_type = other DNA
acccacaccttatagaggcg

SEQ ID NO: 855 - DNA, 20 bp, synthetic construct
  misc_feature 1..20: note = Synthetic construct
  source 1..20: mol_type = other DNA
cccacaccttatagaggcgt

SEQ ID NO: 856 - DNA, 20 bp, synthetic construct
  misc_feature 1..20: note = Synthetic construct
  source 1..20: mol_type = other DNA
ccacaccttatagaggcgtg

SEQ ID NO: 857 - DNA, 20 bp, synthetic construct
  misc_feature 1..20: note = Synthetic construct
  source 1..20: mol_type = other DNA
cacaccttatagaggcgtgg

SEQ ID NO: 858 - DNA, 20 bp, synthetic construct
  misc_feature 1..20: note = Synthetic construct
  source 1..20: mol_type = other DNA
acaccttatagaggcgtgga

SEQ ID NO: 859 - DNA, 20 bp, synthetic construct
  misc_feature 1..20: note = Synthetic construct
  source 1..20: mol_type = other DNA
caccttatagaggcgtggat

SEQ ID NO: 860 - DNA, 20 bp, synthetic construct
  misc_feature 1..20: note = Synthetic construct
  source 1..20: mol_type = other DNA
accttatagaggcgtggatc

SEQ ID NO: 861 - DNA, 20 bp, synthetic construct
  misc_feature 1..20: note = Synthetic construct
  source 1..20: mol_type = other DNA
ccttatagaggcgtggatct

SEQ ID NO: 862 - DNA, 20 bp, synthetic construct
  misc_feature 1..20: note = Synthetic construct
  source 1..20: mol_type = other DNA
cttatagaggcgtggatctg

SEQ ID NO: 863 - DNA, 20 bp, synthetic construct
  misc_feature 1..20: note = Synthetic construct
  source 1..20: mol_type = other DNA
ttatagaggcgtggatctga

SEQ ID NO: 864 - DNA, 20 bp, synthetic construct
  misc_feature 1..20: note = Synthetic construct
  source 1..20: mol_type = other DNA
tatagaggcgtggatctgac

SEQ ID NO: 865 - DNA, 20 bp, synthetic construct
  misc_feature 1..20: note = Synthetic construct
  source 1..20: mol_type = other DNA
atagaggcgtggatctgaca

SEQ ID NO: 866 - DNA, 20 bp, synthetic construct
  misc_feature 1..20: note = Synthetic construct
  source 1..20: mol_type = other DNA
tagaggcgtggatctgacat

SEQ ID NO: 867 - DNA, 20 bp, synthetic construct
  misc_feature 1..20: note = Synthetic construct
  source 1..20: mol_type = other DNA
agaggcgtggatctgacata

SEQ ID NO: 868 - DNA, 20 bp, synthetic construct
  misc_feature 1..20: note = Synthetic construct
  source 1..20: mol_type = other DNA
gaggcgtggatctgacatac

SEQ ID NO: 869 - DNA, 20 bp, synthetic construct
  misc_feature 1..20: note = Synthetic construct
  source 1..20: mol_type = other DNA
aggcgtggatctgacatacc

SEQ ID NO: 870 - DNA, 20 bp, synthetic construct
  misc_feature 1..20: note = Synthetic construct
  source 1..20: mol_type = other DNA
ggcgtggatctgacatacct

SEQ ID NO: 871 - DNA, 20 bp, synthetic construct
  misc_feature 1..20: note = Synthetic construct
  source 1..20: mol_type = other DNA
gcgtggatctgacatacctc

SEQ ID NO: 872 - DNA, 20 bp, synthetic construct
  misc_feature 1..20: note = Synthetic construct
  source 1..20: mol_type = other DNA
cgtggatctgacatacctcc

SEQ ID NO: 873 - DNA, 20 bp, synthetic construct
  misc_feature 1..20: note = Synthetic construct
  source 1..20: mol_type = other DNA
gtggatctgacatacctccg

SEQ ID NO: 874 - DNA, 20 bp, synthetic construct
  misc_feature 1..20: note = Synthetic construct
  source 1..20: mol_type = other DNA
tggatctgacatacctccga

SEQ ID NO: 875 - DNA, 20 bp, synthetic construct
  misc_feature 1..20: note = Synthetic construct
  source 1..20: mol_type = other DNA
ggatctgacatacctccgac

SEQ ID NO: 876 - DNA, 20 bp, synthetic construct
  misc_feature 1..20: note = Synthetic construct
  source 1..20: mol_type = other DNA
gatctgacatacctccgaca

SEQ ID NO: 877 - DNA, 20 bp, synthetic construct
  misc_feature 1..20: note = Synthetic construct
  source 1..20: mol_type = other DNA
atctgacatacctccgacaa

SEQ ID NO: 878 - DNA, 20 bp, synthetic construct
  misc_feature 1..20: note = Synthetic construct
  source 1..20: mol_type = other DNA
tctgacatacctccgacaac

SEQ ID NO: 879 - DNA, 20 bp, synthetic construct
  misc_feature 1..20: note = Synthetic construct
  source 1..20: mol_type = other DNA
ctgacatacctccgacaact

SEQ ID NO: 880 - DNA, 20 bp, synthetic construct
  misc_feature 1..20: note = Synthetic construct
  source 1..20: mol_type = other DNA
tgacatacctccgacaactc

SEQ ID NO: 881 - DNA, 20 bp, synthetic construct
  misc_feature 1..20: note = Synthetic construct
  source 1..20: mol_type = other DNA
gacatacctccgacaactcc

SEQ ID NO: 882 - DNA, 20 bp, synthetic construct
  misc_feature 1..20: note = Synthetic construct
  source 1..20: mol_type = other DNA
acatacctccgacaactccc

SEQ ID NO: 883 - DNA, 20 bp, synthetic construct
  misc_feature 1..20: note = Synthetic construct
  source 1..20: mol_type = other DNA
catacctccgacaactcccc

SEQ ID NO: 884 - DNA, 20 bp, synthetic construct
  misc_feature 1..20: note = Synthetic construct
  source 1..20: mol_type = other DNA
atacctccgacaactcccca

SEQ ID NO: 885 - DNA, 20 bp, synthetic construct
  misc_feature 1..20: note = Synthetic construct
  source 1..20: mol_type = other DNA
tacctccgacaactccccaa

SEQ ID NO: 886 - DNA, 20 bp, synthetic construct
  misc_feature 1..20: note = Synthetic construct
  source 1..20: mol_type = other DNA
acctccgacaactccccaac

SEQ ID NO: 887 - DNA, 20 bp, synthetic construct
  misc_feature 1..20: note = Synthetic construct
  source 1..20: mol_type = other DNA
cctccgacaactccccaacc

SEQ ID NO: 888 - DNA, 20 bp, synthetic construct
  misc_feature 1..20: note = Synthetic construct
  source 1..20: mol_type = other DNA
ctccgacaactccccaaccc

SEQ ID NO: 889 - DNA, 20 bp, synthetic construct
  misc_feature 1..20: note = Synthetic construct
  source 1..20: mol_type = other DNA
tccgacaactccccaacccc

SEQ ID NO: 890 - DNA, 20 bp, synthetic construct
  misc_feature 1..20: note = Synthetic construct
  source 1..20: mol_type = other DNA
ccgacaactccccaaccccg

SEQ ID NO: 891 - DNA, 20 bp, synthetic construct
  misc_feature 1..20: note = Synthetic construct
  source 1..20: mol_type = other DNA
cgacaactccccaaccccgt

SEQ ID NO: 892 - DNA, 20 bp, synthetic construct
  misc_feature 1..20: note = Synthetic construct
  source 1..20: mol_type = other DNA
gacaactccccaaccccgta

SEQ ID NO: 893 - DNA, 20 bp, synthetic construct
  misc_feature 1..20: note = Synthetic construct
  source 1..20: mol_type = other DNA
acaactccccaaccccgtag

SEQ ID NO: 894 - DNA, 20 bp, synthetic construct
  misc_feature 1..20: note = Synthetic construct
  source 1..20: mol_type = other DNA
caactccccaaccccgtagc

SEQ ID NO: 895 - DNA, 20 bp, synthetic construct
  misc_feature 1..20: note = Synthetic construct
  source 1..20: mol_type = other DNA
aactccccaaccccgtagcc

SEQ ID NO: 896 - DNA, 20 bp, synthetic construct
  misc_feature 1..20: note = Synthetic construct
  source 1..20: mol_type = other DNA
actccccaaccccgtagccg

SEQ ID NO: 897 - DNA, 20 bp, synthetic construct
  misc_feature 1..20: note = Synthetic construct
  source 1..20: mol_type = other DNA
ctccccaaccccgtagccga

SEQ ID NO: 898 - DNA, 20 bp, synthetic construct
  misc_feature 1..20: note = Synthetic construct
  source 1..20: mol_type = other DNA
tccccaaccccgtagccgat

SEQ ID NO: 899 - DNA, 20 bp, synthetic construct
  misc_feature 1..20: note = Synthetic construct
  source 1..20: mol_type = other DNA
ccccaaccccgtagccgatt

SEQ ID NO: 900 - DNA, 20 bp, synthetic construct
  misc_feature 1..20: note = Synthetic construct
  source 1..20: mol_type = other DNA
cccaaccccgtagccgattt

SEQ ID NO: 901 - DNA, 20 bp, synthetic construct
  misc_feature 1..20: note = Synthetic construct
  source 1..20: mol_type = other DNA
ccaaccccgtagccgattta

SEQ ID NO: 902 - DNA, 20 bp, synthetic construct
  misc_feature 1..20: note = Synthetic construct
  source 1..20: mol_type = other DNA
caaccccgtagccgatttaa

SEQ ID NO: 903 - DNA, 20 bp, synthetic construct
  misc_feature 1..20: note = Synthetic construct
  source 1..20: mol_type = other DNA
aaccccgtagccgatttaat

SEQ ID NO: 904 - DNA, 20 bp, synthetic construct
  misc_feature 1..20: note = Synthetic construct
  source 1..20: mol_type = other DNA
accccgtagccgatttaata

SEQ ID NO: 905 - DNA, 20 bp, synthetic construct
  misc_feature 1..20: note = Synthetic construct
  source 1..20: mol_type = other DNA
ccccgtagccgatttaatat

SEQ ID NO: 906 - DNA, 20 bp, synthetic construct
  misc_feature 1..20: note = Synthetic construct
  source 1..20: mol_type = other DNA
cccgtagccgatttaatatc

SEQ ID NO: 907 - DNA, 20 bp, synthetic construct
  misc_feature 1..20: note = Synthetic construct
  source 1..20: mol_type = other DNA
ccgtagccgatttaatatca

SEQ ID NO: 908 - DNA, 20 bp, synthetic construct
  misc_feature 1..20: note = Synthetic construct
  source 1..20: mol_type = other DNA
cgtagccgatttaatatcag

SEQ ID NO: 909 - DNA, 20 bp, synthetic construct
  misc_feature 1..20: note = Synthetic construct
  source 1..20: mol_type = other DNA
gtagccgatttaatatcagc

SEQ ID NO: 910 - DNA, 20 bp, synthetic construct
  misc_feature 1..20: note = Synthetic construct
  source 1..20: mol_type = other DNA
tagccgatttaatatcagca

SEQ ID NO: 911 - DNA, 20 bp, synthetic construct
  misc_feature 1..20: note = Synthetic construct
  source 1..20: mol_type = other DNA
agccgatttaatatcagcat

SEQ ID NO: 912 - DNA, 20 bp, synthetic construct
  misc_feature 1..20: note = Synthetic construct
  source 1..20: mol_type = other DNA
gccgatttaatatcagcatc

SEQ ID NO: 913 - DNA, 20 bp, synthetic construct
  misc_feature 1..20: note = Synthetic construct
  source 1..20: mol_type = other DNA
ccgatttaatatcagcatca

SEQ ID NO: 914 - DNA, 20 bp, synthetic construct
  misc_feature 1..20: note = Synthetic construct
  source 1..20: mol_type = other DNA
cgatttaatatcagcatcag

SEQ ID NO: 915 - DNA, 20 bp, synthetic construct
  misc_feature 1..20: note = Synthetic construct
  source 1..20: mol_type = other DNA
gatttaatatcagcatcagg

SEQ ID NO: 916 - DNA, 20 bp, synthetic construct
  misc_feature 1..20: note = Synthetic construct
  source 1..20: mol_type = other DNA
atttaatatcagcatcaggg

SEQ ID NO: 917 - DNA, 20 bp, synthetic construct
  misc_feature 1..20: note = Synthetic construct
  source 1..20: mol_type = other DNA
tttaatatcagcatcagggc

SEQ ID NO: 918 - DNA, 20 bp, synthetic construct
  misc_feature 1..20: note = Synthetic construct
  source 1..20: mol_type = other DNA
ttaatatcagcatcagggcg

SEQ ID NO: 919 - DNA, 20 bp, synthetic construct
  misc_feature 1..20: note = Synthetic construct
  source 1..20: mol_type = other DNA
taatatcagcatcagggcga

SEQ ID NO: 920 - DNA, 20 bp, synthetic construct
  misc_feature 1..20: note = Synthetic construct
  source 1..20: mol_type = other DNA
aatatcagcatcagggcgaa

SEQ ID NO: 921 - DNA, 20 bp, synthetic construct
  misc_feature 1..20: note = Synthetic construct
  source 1..20: mol_type = other DNA
atatcagcatcagggcgaag

SEQ ID NO: 922 - DNA, 20 bp, synthetic construct
  misc_feature 1..20: note = Synthetic construct
  source 1..20: mol_type = other DNA
tatcagcatcagggcgaaga

SEQ ID NO: 923 - DNA, 20 bp, synthetic construct
  misc_feature 1..20: note = Synthetic construct
  source 1..20: mol_type = other DNA
atcagcatcagggcgaagag

SEQ ID NO: 924 - DNA, 20 bp, synthetic construct
  misc_feature 1..20: note = Synthetic construct
  source 1..20: mol_type = other DNA
tcagcatcagggcgaagaga

SEQ ID NO: 925 - DNA, 20 bp, synthetic construct
  misc_feature 1..20: note = Synthetic construct
  source 1..20: mol_type = other DNA
cagcatcagggcgaagagat

SEQ ID NO: 926 - DNA, 20 bp, synthetic construct
  misc_feature 1..20: note = Synthetic construct
  source 1..20: mol_type = other DNA
agcatcagggcgaagagatt

SEQ ID NO: 927 - DNA, 20 bp, synthetic construct
  misc_feature 1..20: note = Synthetic construct
  source 1..20: mol_type = other DNA
gcatcagggcgaagagattg

SEQ ID NO: 928 - DNA, 20 bp, synthetic construct
  misc_feature 1..20: note = Synthetic construct
  source 1..20: mol_type = other DNA
catcagggcgaagagattgt

SEQ ID NO: 929 - DNA, 20 bp, synthetic construct
  misc_feature 1..20: note = Synthetic construct
  source 1..20: mol_type = other DNA
atcagggcgaagagattgtc

SEQ ID NO: 930 - DNA, 20 bp, synthetic construct
  misc_feature 1..20: note = Synthetic construct
  source 1..20: mol_type = other DNA
tcagggcgaagagattgtca

SEQ ID NO: 931 - DNA, 20 bp, synthetic construct
  misc_feature 1..20: note = Synthetic construct
  source 1..20: mol_type = other DNA
cagggcgaagagattgtcaa

SEQ ID NO: 932 - DNA, 20 bp, synthetic construct
  misc_feature 1..20: note = Synthetic construct
  source 1..20: mol_type = other DNA
agggcgaagagattgtcaac

SEQ ID NO: 933 - DNA, 20 bp, synthetic construct
  misc_feature 1..20: note = Synthetic construct
  source 1..20: mol_type = other DNA
gggcgaagagattgtcaaca

SEQ ID NO: 934 - DNA, 20 bp, synthetic construct
  misc_feature 1..20: note = Synthetic construct
  source 1..20: mol_type = other DNA
ggcgaagagattgtcaacag

SEQ ID NO: 935 - DNA, 20 bp, synthetic construct
  misc_feature 1..20: note = Synthetic construct
  source 1..20: mol_type = other DNA
gcgaagagattgtcaacagg

SEQ ID NO: 936 - DNA, 20 bp, synthetic construct
  misc_feature 1..20: note = Synthetic construct
  source 1..20: mol_type = other DNA
cgaagagattgtcaacaggt

SEQ ID NO: 937 - DNA, 20 bp, synthetic construct
  misc_feature 1..20: note = Synthetic construct
  source 1..20: mol_type = other DNA
gaagagattgtcaacaggtt

SEQ ID NO: 938 - DNA, 20 bp, synthetic construct
  misc_feature 1..20: note = Synthetic construct
  source 1..20: mol_type = other DNA
aagagattgtcaacaggttt

SEQ ID NO: 939 - DNA, 20 bp, synthetic construct
  misc_feature 1..20: note = Synthetic construct
  source 1..20: mol_type = other DNA
agagattgtcaacaggtttc

SEQ ID NO: 940 - DNA, 20 bp, synthetic construct
  misc_feature 1..20: note = Synthetic construct
  source 1..20: mol_type = other DNA
gagattgtcaacaggtttct

SEQ ID NO: 941 - DNA, 20 bp, synthetic construct
  misc_feature 1..20: note = Synthetic construct
  source 1..20: mol_type = other DNA
agattgtcaacaggtttctt

SEQ ID NO: 942 - DNA, 20 bp, synthetic construct
  misc_feature 1..20: note = Synthetic construct
  source 1..20: mol_type = other DNA
gattgtcaacaggtttcttg

SEQ ID NO: 943 - DNA, 20 bp, synthetic construct
  misc_feature 1..20: note = Synthetic construct
  source 1..20: mol_type = other DNA
attgtcaacaggtttcttga

SEQ ID NO: 944 - DNA, 20 bp, synthetic construct
  misc_feature 1..20: note = Synthetic construct
  source 1..20: mol_type = other DNA
ttgtcaacaggtttcttgat

SEQ ID NO: 945 - DNA, 20 bp, synthetic construct
  misc_feature 1..20: note = Synthetic construct
  source 1..20: mol_type = other DNA
tgtcaacaggtttcttgatg

SEQ ID NO: 946 - DNA, 20 bp, synthetic construct
  misc_feature 1..20: note = Synthetic construct
  source 1..20: mol_type = other DNA
gtcaacaggtttcttgatgt

SEQ ID NO: 947 - DNA, 20 bp, synthetic construct
  misc_feature 1..20: note = Synthetic construct
  source 1..20: mol_type = other DNA
tcaacaggtttcttgatgta

SEQ ID NO: 948 - DNA, 20 bp, synthetic construct
  misc_feature 1..20: note = Synthetic construct
  source 1..20: mol_type = other DNA
caacaggtttcttgatgtaa

SEQ ID NO: 949 - DNA, 20 bp, synthetic construct
  misc_feature 1..20: note = Synthetic construct
  source 1..20: mol_type = other DNA
aacaggtttcttgatgtaaa

SEQ ID NO: 950 - DNA, 20 bp, synthetic construct
  misc_feature 1..20: note = Synthetic construct
  source 1..20: mol_type = other DNA
acaggtttcttgatgtaaaa

SEQ ID NO: 951 - DNA, 20 bp, synthetic construct
  misc_feature 1..20: note = Synthetic construct
  source 1..20: mol_type = other DNA
caggtttcttgatgtaaaac

SEQ ID NO: 952 - DNA, 20 bp, synthetic construct
  misc_feature 1..20: note = Synthetic construct
  source 1..20: mol_type = other DNA
aggtttcttgatgtaaaacg

SEQ ID NO: 953 - DNA, 20 bp, synthetic construct
  misc_feature 1..20: note = Synthetic construct
  source 1..20: mol_type = other DNA
ggtttcttgatgtaaaacgg

SEQ ID NO: 954 - DNA, 20 bp, synthetic construct
  misc_feature 1..20: note = Synthetic construct
  source 1..20: mol_type = other DNA
gtttcttgatgtaaaacggt

SEQ ID NO: 955 - DNA, 20 bp, synthetic construct
  misc_feature 1..20: note = Synthetic construct
  source 1..20: mol_type = other DNA
tttcttgatgtaaaacggtt

SEQ ID NO: 956 - DNA, 20 bp, synthetic construct
  misc_feature 1..20: note = Synthetic construct
  source 1..20: mol_type = other DNA
ttcttgatgtaaaacggttt

SEQ ID NO: 957 - DNA, 20 bp, synthetic construct
  misc_feature 1..20: note = Synthetic construct
  source 1..20: mol_type = other DNA
tcttgatgtaaaacggtttg

SEQ ID NO: 958 - DNA, 20 bp, synthetic construct
  misc_feature 1..20: note = Synthetic construct
  source 1..20: mol_type = other DNA
cttgatgtaaaacggtttga

SEQ ID NO: 959 - DNA, 20 bp, synthetic construct
  misc_feature 1..20: note = Synthetic construct
  source 1..20: mol_type = other DNA
ttgatgtaaaacggtttgac

SEQ ID NO: 960 - DNA, 20 bp, synthetic construct
  misc_feature 1..20: note = Synthetic construct
  source 1..20: mol_type = other DNA
tgatgtaaaacggtttgaca

SEQ ID NO: 961 - DNA, 20 bp, synthetic construct
  misc_feature 1..20: note = Synthetic construct
  source 1..20: mol_type = other DNA
gatgtaaaacggtttgacat

SEQ ID NO: 962 - DNA, 20 bp, synthetic construct
  misc_feature 1..20: note = Synthetic construct
  source 1..20: mol_type = other DNA
atgtaaaacggtttgacatc

SEQ ID NO: 963 - DNA, 20 bp, synthetic construct
  misc_feature 1..20: note = Synthetic construct
  source 1..20: mol_type = other DNA
tgtaaaacggtttgacatcg

SEQ ID NO: 964 - DNA, 20 bp, synthetic construct
  misc_feature 1..20: note = Synthetic construct
  source 1..20: mol_type = other DNA
gtaaaacggtttgacatcga

SEQ ID NO: 965 - DNA, 20 bp, synthetic construct
  misc_feature 1..20: note = Synthetic construct
  source 1..20: mol_type = other DNA
taaaacggtttgacatcgac

SEQ ID NO: 966 - DNA, 20 bp, synthetic construct
  misc_feature 1..20: note = Synthetic construct
  source 1..20: mol_type = other DNA
aaaacggtttgacatcgaca

SEQ ID NO: 967 - DNA, 20 bp, synthetic construct
  misc_feature 1..20: note = Synthetic construct
  source 1..20: mol_type = other DNA
aaacggtttgacatcgacac

SEQ ID NO: 968 - DNA, 20 bp, synthetic construct
  misc_feature 1..20: note = Synthetic construct
  source 1..20: mol_type = other DNA
aacggtttgacatcgacacc

SEQ ID NO: 969 - DNA, 20 bp, synthetic construct
  misc_feature 1..20: note = Synthetic construct
  source 1..20: mol_type = other DNA
acggtttgacatcgacacca

SEQ ID NO: 970 - DNA, 20 bp, synthetic construct
  misc_feature 1..20: note = Synthetic construct
  source 1..20: mol_type = other DNA
cggtttgacatcgacaccac

SEQ ID NO: 971 - DNA, 20 bp, synthetic construct
  misc_feature 1..20: note = Synthetic construct
  source 1..20: mol_type = other DNA
ggtttgacatcgacaccacg

SEQ ID NO: 972 - DNA, 20 bp, synthetic construct
  misc_feature 1..20: note = Synthetic construct
  source 1..20: mol_type = other DNA
gtttgacatcgacaccacgg

SEQ ID NO: 973 - DNA, 20 bp, synthetic construct
  misc_feature 1..20: note = Synthetic construct
  source 1..20: mol_type = other DNA
tttgacatcgacaccacggt

SEQ ID NO: 974 - DNA, 20 bp, synthetic construct
  misc_feature 1..20: note = Synthetic construct
  source 1..20: mol_type = other DNA
ttgacatcgacaccacggta

SEQ ID NO: 975 - DNA, 20 bp, synthetic construct
  misc_feature 1..20: note = Synthetic construct
  source 1..20: mol_type = other DNA
tgacatcgacaccacggtaa

SEQ ID NO: 976 - DNA, 20 bp, synthetic construct
  misc_feature 1..20: note = Synthetic construct
  source 1..20: mol_type = other DNA
gacatcgacaccacggtaaa

SEQ ID NO: 977 - DNA, 20 bp, synthetic construct
  misc_feature 1..20: note = Synthetic construct
  source 1..20: mol_type = other DNA
acatcgacaccacggtaaaa

SEQ ID NO: 978 - DNA, 20 bp, synthetic construct
  misc_feature 1..20: note = Synthetic construct
  source 1..20: mol_type = other DNA
catcgacaccacggtaaaag

SEQ ID NO: 979 - DNA, 20 bp, synthetic construct
  misc_feature 1..20: note = Synthetic construct
  source 1..20: mol_type = other DNA
atcgacaccacggtaaaagt

SEQ ID NO: 980 - DNA, 20 bp, synthetic construct
  misc_feature 1..20: note = Synthetic construct
  source 1..20: mol_type = other DNA
tcgacaccacggtaaaagtg

SEQ ID NO: 981 - DNA, 20 bp, synthetic construct
  misc_feature 1..20: note = Synthetic construct
  source 1..20: mol_type = other DNA
cgacaccacggtaaaagtgc

SEQ ID NO: 982 - DNA, 20 bp, synthetic construct
  misc_feature 1..20: note = Synthetic construct
  source 1..20: mol_type = other DNA
gacaccacggtaaaagtgcg

SEQ ID NO: 983 - DNA, 20 bp, synthetic construct
  misc_feature 1..20: note = Synthetic construct
  source 1..20: mol_type = other DNA
acaccacggtaaaagtgcgc

SEQ ID NO: 984 - DNA, 20 bp, synthetic construct
  misc_feature 1..20: note = Synthetic construct
  source 1..20: mol_type = other DNA
caccacggtaaaagtgcgcg

SEQ ID NO: 985 - DNA, 20 bp, synthetic construct
  misc_feature 1..20: note = Synthetic construct
  source 1..20: mol_type = other DNA
accacggtaaaagtgcgcgc

SEQ ID NO: 986 - DNA, 20 bp, synthetic construct
  misc_feature 1..20: note = Synthetic construct
  source 1..20: mol_type = other DNA
ccacggtaaaagtgcgcgcc

SEQ ID NO: 987 - DNA, 20 bp, synthetic construct
  misc_feature 1..20: note = Synthetic construct
  source 1..20: mol_type = other DNA
cacggtaaaagtgcgcgccg

SEQ ID NO: 988 - DNA, 20 bp, synthetic construct
  misc_feature 1..20: note = Synthetic construct
  source 1..20: mol_type = other DNA
acggtaaaagtgcgcgccgc

SEQ ID NO: 989 - DNA, 20 bp, synthetic construct
  misc_feature 1..20: note = Synthetic construct
  source 1..20: mol_type = other DNA
cggtaaaagtgcgcgccgca

SEQ ID NO: 990 - DNA, 20 bp, synthetic construct
  misc_feature 1..20: note = Synthetic construct
  source 1..20: mol_type = other DNA
ggtaaaagtgcgcgccgcag

SEQ ID NO: 991 - DNA, 20 bp, synthetic construct
  misc_feature 1..20: note = Synthetic construct
  source 1..20: mol_type = other DNA
gtaaaagtgcgcgccgcagc

SEQ ID NO: 992 - DNA, 20 bp, synthetic construct
  misc_feature 1..20: note = Synthetic construct
  source 1..20: mol_type = other DNA
taaaagtgcgcgccgcagct

SEQ ID NO: 993 - DNA, 20 bp, synthetic construct
  misc_feature 1..20: note = Synthetic construct
  source 1..20: mol_type = other DNA
aaaagtgcgcgccgcagctc

SEQ ID NO: 994 - DNA, 20 bp, synthetic construct
  misc_feature 1..20: note = Synthetic construct
  source 1..20: mol_type = other DNA
aaagtgcgcgccgcagctct

SEQ ID NO: 995 - DNA, 20 bp, synthetic construct
  misc_feature 1..20: note = Synthetic construct
  source 1..20: mol_type = other DNA
aagtgcgcgccgcagctctc

SEQ ID NO: 996 - DNA, 20 bp, synthetic construct
  misc_feature 1..20: note = Synthetic construct
  source 1..20: mol_type = other DNA
agtgcgcgccgcagctctcg

SEQ ID NO: 997 - DNA, 20 bp, synthetic construct
  misc_feature 1..20: note = Synthetic construct
  source 1..20: mol_type = other DNA
gtgcgcgccgcagctctcgc

SEQ ID NO: 998 - DNA, 20 bp, synthetic construct
  misc_feature 1..20: note = Synthetic construct
  source 1..20: mol_type = other DNA
tgcgcgccgcagctctcgcg

SEQ ID NO: 999 - DNA, 20 bp, synthetic construct
  misc_feature 1..20: note = Synthetic construct
  source 1..20: mol_type = other DNA
gcgcgccgcagctctcgcga

SEQ ID NO: 1000 - DNA, 20 bp, synthetic construct
  misc_feature 1..20: note = Synthetic construct
  source 1..20: mol_type = other DNA
cgcgccgcagctctcgcgaa

SEQ ID NO: 1001 - DNA, 20 bp, synthetic construct
  misc_feature 1..20: note = Synthetic construct
  source 1..20: mol_type = other DNA
gcgccgcagctctcgcgaaa

SEQ ID NO: 1002 - DNA, 20 bp, synthetic construct
  misc_feature 1..20: note = Synthetic construct
  source 1..20: mol_type = other DNA
cgccgcagctctcgcgaaag

SEQ ID NO: 1003 - DNA, 20 bp, synthetic construct
  misc_feature 1..20: note = Synthetic construct
  source 1..20: mol_type = other DNA
gccgcagctctcgcgaaaga

SEQ ID NO: 1004 - DNA, 20 bp, synthetic construct
  misc_feature 1..20: note = Synthetic construct
  source 1..20: mol_type = other DNA
ccgcagctctcgcgaaagag

SEQ ID NO: 1005 - DNA, 20 bp, synthetic construct
  misc_feature 1..20: note = Synthetic construct
  source 1..20: mol_type = other DNA
cgcagctctcgcgaaagagc

SEQ ID NO: 1006 - DNA, 20 bp, synthetic construct
  misc_feature 1..20: note = Synthetic construct
  source 1..20: mol_type = other DNA
gcagctctcgcgaaagagcc

SEQ ID NO: 1007 - DNA, 20 bp, synthetic construct
  misc_feature 1..20: note = Synthetic construct
  source 1..20: mol_type = other DNA
cagctctcgcgaaagagccc

SEQ ID NO: 1008 - DNA, 20 bp, synthetic construct
  misc_feature 1..20: note = Synthetic construct
  source 1..20: mol_type = other DNA
agctctcgcgaaagagcccg

SEQ ID NO: 1009 - DNA, 20 bp, synthetic construct
  misc_feature 1..20: note = Synthetic construct
  source 1..20: mol_type = other DNA
gctctcgcgaaagagcccgg

SEQ ID NO: 1010 - DNA, 20 bp, synthetic construct
  misc_feature 1..20: note = Synthetic construct
  source 1..20: mol_type = other DNA
ctctcgcgaaagagcccgga

SEQ ID NO: 1011 - DNA, 20 bp, synthetic construct
  misc_feature 1..20: note = Synthetic construct
  source 1..20: mol_type = other DNA
tctcgcgaaagagcccggac

SEQ ID NO: 1012 - DNA, 20 bp, synthetic construct
  misc_feature 1..20: note = Synthetic construct
  source 1..20: mol_type = other DNA
ctcgcgaaagagcccggaca

SEQ ID NO: 1013 - DNA, 20 bp, synthetic construct
  misc_feature 1..20: note = Synthetic construct
  source 1..20: mol_type = other DNA
tcgcgaaagagcccggacac

SEQ ID NO: 1014 - DNA, 20 bp, synthetic construct
  misc_feature 1..20: note = Synthetic construct
  source 1..20: mol_type = other DNA
cgcgaaagagcccggacacg

SEQ ID NO: 1015 - DNA, 20 bp, synthetic construct
  misc_feature 1..20: note = Synthetic construct
  source 1..20: mol_type = other DNA
gcgaaagagcccggacacga

SEQ ID NO: 1016 - DNA, 20 bp, synthetic construct
  misc_feature 1..20: note = Synthetic construct
  source 1..20: mol_type = other DNA
cgaaagagcccggacacgaa

SEQ ID NO: 1017 - DNA, 20 bp, synthetic construct
  misc_feature 1..20: note = Synthetic construct
  source 1..20: mol_type = other DNA
gaaagagcccggacacgaac

SEQ ID NO: 1018 - DNA, 20 bp, synthetic construct
  misc_feature 1..20: note = Synthetic construct
  source 1..20: mol_type = other DNA
aaagagcccggacacgaacg

SEQ ID NO: 1019 - DNA, 20 bp, synthetic construct
  misc_feature 1..20: note = Synthetic construct
  source 1..20: mol_type = other DNA
aagagcccggacacgaacgt

SEQ ID NO: 1020 - DNA, 20 bp, synthetic construct
  misc_feature 1..20: note = Synthetic construct
  source 1..20: mol_type = other DNA
agagcccggacacgaacgtt

SEQ ID NO: 1021 - DNA, 20 bp, synthetic construct
  misc_feature 1..20: note = Synthetic construct
  source 1..20: mol_type = other DNA
gagcccggacacgaacgttt

SEQ ID NO: 1022 - DNA, 20 bp, synthetic construct
  misc_feature 1..20: note = Synthetic construct
  source 1..20: mol_type = other DNA
agcccggacacgaacgtttt

SEQ ID NO: 1023 - DNA, 20 bp, synthetic construct
  misc_feature 1..20: note = Synthetic construct
  source 1..20: mol_type = other DNA
gcccggacacgaacgtttta

SEQ ID NO: 1024 - DNA, 20 bp, synthetic construct
  misc_feature 1..20: note = Synthetic construct
  source 1..20: mol_type = other DNA
cccggacacgaacgttttac

SEQ ID NO: 1025 - DNA, 20 bp, synthetic construct
  misc_feature 1..20: note = Synthetic construct
  source 1..20: mol_type = other DNA
ccggacacgaacgttttacg

SEQ ID NO: 1026 - DNA, 20 bp, synthetic construct
  misc_feature 1..20: note = Synthetic construct
  source 1..20: mol_type = other DNA
cggacacgaacgttttacga

SEQ ID NO: 1027 - DNA, 20 bp, synthetic construct
  misc_feature 1..20: note = Synthetic construct
  source 1..20: mol_type = other DNA
ggacacgaacgttttacgaa

SEQ ID NO: 1028 - DNA, 20 bp, synthetic construct
  misc_feature 1..20: note = Synthetic construct
  source 1..20: mol_type = other DNA
gacacgaacgttttacgaag

SEQ ID NO: 1029 - DNA, 20 bp, synthetic construct
  misc_feature 1..20: note = Synthetic construct
  source 1..20: mol_type = other DNA
acacgaacgttttacgaaga

SEQ ID NO: 1030 - DNA, 20 bp, synthetic construct
  misc_feature 1..20: note = Synthetic construct
  source 1..20: mol_type = other DNA
cacgaacgttttacgaagat

SEQ ID NO: 1031 - DNA, 20 bp, synthetic construct
  misc_feature 1..20: note = Synthetic construct
  source 1..20: mol_type = other DNA
acgaacgttttacgaagatt

SEQ ID NO: 1032 - DNA, 20 bp, synthetic construct
  misc_feature 1..20: note = Synthetic construct
  source 1..20: mol_type = other DNA
cgaacgttttacgaagattc

SEQ ID NO: 1033 - DNA, 20 bp, synthetic construct
  misc_feature 1..20: note = Synthetic construct
  source 1..20: mol_type = other DNA
gaacgttttacgaagattcg

SEQ ID NO: 1034 - DNA, 20 bp, synthetic construct
  misc_feature 1..20: note = Synthetic construct
  source 1..20: mol_type = other DNA
aacgttttacgaagattcgg

SEQ ID NO: 1035 - DNA, 20 bp, synthetic construct
  misc_feature 1..20: note = Synthetic construct
  source 1..20: mol_type = other DNA
acgttttacgaagattcggt

SEQ ID NO: 1036 - DNA, 20 bp, synthetic construct
  misc_feature 1..20: note = Synthetic construct
  source 1..20: mol_type = other DNA
cgttttacgaagattcggtt

SEQ ID NO: 1037 - DNA, 20 bp, synthetic construct
  misc_feature 1..20: note = Synthetic construct
  source 1..20: mol_type = other DNA
gttttacgaagattcggttt

SEQ ID NO: 1038 - DNA, 20 bp, synthetic construct
  misc_feature 1..20: note = Synthetic construct
  source 1..20: mol_type = other DNA
ttttacgaagattcggttta

SEQ ID NO: 1039 - DNA, 20 bp, synthetic construct
  misc_feature 1..20: note = Synthetic construct
  source 1..20: mol_type = other DNA
tttacgaagattcggtttaa

SEQ ID NO: 1040 - DNA, 20 bp, synthetic construct
  misc_feature 1..20: note = Synthetic construct
  source 1..20: mol_type = other DNA
ttacgaagattcggtttaaa

SEQ ID NO: 1041 - DNA, 20 bp, synthetic construct
  misc_feature 1..20: note = Synthetic construct
  source 1..20: mol_type = other DNA
tacgaagattcggtttaaaa

SEQ ID NO: 1042 - DNA, 20 bp, synthetic construct
  misc_feature 1..20: note = Synthetic construct
  source 1..20: mol_type = other DNA
acgaagattcggtttaaaac

SEQ ID NO: 1043 - DNA, 20 bp, synthetic construct
  misc_feature 1..20: note = Synthetic construct
  source 1..20: mol_type = other DNA
cgaagattcggtttaaaacc

SEQ ID NO: 1044 - DNA, 20 bp, synthetic construct
  misc_feature 1..20: note = Synthetic construct
  source 1..20: mol_type = other DNA
gaagattcggtttaaaaccg

SEQ ID NO: 1045 - DNA, 20 bp, synthetic construct
  misc_feature 1..20: note = Synthetic construct
  source 1..20: mol_type = other DNA
aagattcggtttaaaaccgt

SEQ ID NO: 1046 - DNA, 20 bp, synthetic construct
  misc_feature 1..20: note = Synthetic construct
  source 1..20: mol_type = other DNA
agattcggtttaaaaccgta

SEQ ID NO: 1047 - DNA, 20 bp, synthetic construct
  misc_feature 1..20: note = Synthetic construct
  source 1..20: mol_type = other DNA
gattcggtttaaaaccgtag

SEQ ID NO: 1048 - DNA, 20 bp, synthetic construct
  misc_feature 1..20: note = Synthetic construct
  source 1..20: mol_type = other DNA
attcggtttaaaaccgtagt

SEQ ID NO: 1049 - DNA, 20 bp, synthetic construct
  misc_feature 1..20: note = Synthetic construct
  source 1..20: mol_type = other DNA
ttcggtttaaaaccgtagta

SEQ ID NO: 1050 - DNA, 20 bp, synthetic construct
  misc_feature 1..20: note = Synthetic construct
  source 1..20: mol_type = other DNA
tcggtttaaaaccgtagtag

SEQ ID NO: 1051 - DNA, 20 bp, synthetic construct
  misc_feature 1..20: note = Synthetic construct
  source 1..20: mol_type = other DNA
cggtttaaaaccgtagtagg

SEQ ID NO: 1052 - DNA, 20 bp, synthetic construct
  misc_feature 1..20: note = Synthetic construct
  source 1..20: mol_type = other DNA
ggtttaaaaccgtagtaggc

SEQ ID NO: 1053 - DNA, 20 bp, synthetic construct
  misc_feature 1..20: note = Synthetic construct
  source 1..20: mol_type = other DNA
gtttaaaaccgtagtaggca

SEQ ID NO: 1054 - DNA, 20 bp, synthetic construct
  misc_feature 1..20: note = Synthetic construct
  source 1..20: mol_type = other DNA
tttaaaaccgtagtaggcaa

SEQ ID NO: 1055 - DNA, 20 bp, synthetic construct
  misc_feature 1..20: note = Synthetic construct
  source 1..20: mol_type = other DNA
ttaaaaccgtagtaggcaag

SEQ ID NO: 1056 - DNA, 20 bp, synthetic construct
  misc_feature 1..20: note = Synthetic construct
  source 1..20: mol_type = other DNA
taaaaccgtagtaggcaagt

SEQ ID NO: 1057 - DNA, 20 bp, synthetic construct
  misc_feature 1..20: note = Synthetic construct
  source 1..20: mol_type = other DNA
aaaaccgtagtaggcaagtg

SEQ ID NO: 1058 - DNA, 20 bp, synthetic construct
  misc_feature 1..20: note = Synthetic construct
  source 1..20: mol_type = other DNA
aaaccgtagtaggcaagtgc

SEQ ID NO: 1059 - DNA, 20 bp, synthetic construct
  misc_feature 1..20: note = Synthetic construct
  source 1..20: mol_type = other DNA
aaccgtagtaggcaagtgcc

SEQ ID NO: 1060 - DNA, 20 bp, synthetic construct
  misc_feature 1..20: note = Synthetic construct
  source 1..20: mol_type = other DNA
accgtagtaggcaagtgcct

SEQ ID NO: 1061 - DNA, 20 bp, synthetic construct
  misc_feature 1..20: note = Synthetic construct
  source 1..20: mol_type = other DNA
ccgtagtaggcaagtgcctc

SEQ ID NO: 1062 - DNA, 20 bp, synthetic construct
  misc_feature 1..20: note = Synthetic construct
  source 1..20: mol_type = other DNA
cgtagtaggcaagtgcctct

SEQ ID NO: 1063 - DNA, 20 bp, synthetic construct
  misc_feature 1..20: note = Synthetic construct
  source 1..20: mol_type = other DNA
gtagtaggcaagtgcctcta

SEQ ID NO: 1064 - DNA, 20 bp, synthetic construct
  misc_feature 1..20: note = Synthetic construct
  source 1..20: mol_type = other DNA
tagtaggcaagtgcctctag

SEQ ID NO: 1065 - DNA, 20 bp, synthetic construct
  misc_feature 1..20: note = Synthetic construct
  source 1..20: mol_type = other DNA
agtaggcaagtgcctctagc

SEQ ID NO: 1066 - DNA, 20 bp, synthetic construct
  misc_feature 1..20: note = Synthetic construct
  source 1..20: mol_type = other DNA
gtaggcaagtgcctctagca

SEQ ID NO: 1067 - DNA, 20 bp, synthetic construct
  misc_feature 1..20: note = Synthetic construct
  source 1..20: mol_type = other DNA
taggcaagtgcctctagcac

SEQ ID NO: 1068 - DNA, 20 bp, synthetic construct
  misc_feature 1..20: note = Synthetic construct
  source 1..20: mol_type = other DNA
aggcaagtgcctctagcaca

SEQ ID NO: 1069 - DNA, 20 bp, synthetic construct
  misc_feature 1..20: note = Synthetic construct
  source 1..20: mol_type = other DNA
ggcaagtgcctctagcacac

SEQ ID NO: 1070 - DNA, 20 bp, synthetic construct
  misc_feature 1..20: note = Synthetic construct
  source 1..20: mol_type = other DNA
gcaagtgcctctagcacacg

SEQ ID NO: 1071 - DNA, 20 bp, synthetic construct
  misc_feature 1..20: note = Synthetic construct
  source 1..20: mol_type = other DNA
caagtgcctctagcacacgg

SEQ ID NO: 1072 - DNA, 20 bp, synthetic construct
  misc_feature 1..20: note = Synthetic construct
  source 1..20: mol_type = other DNA
aagtgcctctagcacacggg

SEQ ID NO: 1073 - DNA, 20 bp, synthetic construct
  misc_feature 1..20: note = Synthetic construct
  source 1..20: mol_type = other DNA
agtgcctctagcacacgggg

SEQ ID NO: 1074 - DNA, 20 bp, synthetic construct
  misc_feature 1..20: note = Synthetic construct
  source 1..20: mol_type = other DNA
gtgcctctagcacacggggt

SEQ ID NO: 1075 - DNA, 20 bp, synthetic construct
  misc_feature 1..20: note = Synthetic construct
  source 1..20: mol_type = other DNA
tgcctctagcacacggggtg

SEQ ID NO: 1076 - DNA, 20 bp, synthetic construct
  misc_feature 1..20: note = Synthetic construct
  source 1..20: mol_type = other DNA
gcctctagcacacggggtgc

SEQ ID NO: 1077 - DNA, 20 bp, synthetic construct
  misc_feature 1..20: note = Synthetic construct
  source 1..20: mol_type = other DNA
cctctagcacacggggtgca

SEQ ID NO: 1078 - DNA, 20 bp, synthetic construct
  misc_feature 1..20: note = Synthetic construct
  source 1..20: mol_type = other DNA
ctctagcacacggggtgcaa

SEQ ID NO: 1079 - DNA, 20 bp, synthetic construct
  misc_feature 1..20: note = Synthetic construct
  source 1..20: mol_type = other DNA
tctagcacacggggtgcaat

SEQ ID NO: 1080 - DNA, 20 bp, synthetic construct
  misc_feature 1..20: note = Synthetic construct
  source 1..20: mol_type = other DNA
ctagcacacggggtgcaatc

SEQ ID NO: 1081 - DNA, 20 bp, synthetic construct
  misc_feature 1..20: note = Synthetic construct
  source 1..20: mol_type = other DNA
tagcacacggggtgcaatct

SEQ ID NO: 1082 - DNA, 20 bp, synthetic construct
  misc_feature 1..20: note = Synthetic construct
  source 1..20: mol_type = other DNA
agcacacggggtgcaatctc

SEQ ID NO: 1083 - DNA, 20 bp, synthetic construct
  misc_feature 1..20: note = Synthetic construct
  source 1..20: mol_type = other DNA
gcacacggggtgcaatctca

SEQ ID NO: 1084 - DNA, 20 bp, synthetic construct
  misc_feature 1..20: note = Synthetic construct
  source 1..20: mol_type = other DNA
cacacggggtgcaatctcac

SEQ ID NO: 1085 - DNA, 20 bp, synthetic construct
  misc_feature 1..20: note = Synthetic construct
  source 1..20: mol_type = other DNA
acacggggtgcaatctcact

SEQ ID NO: 1086 - DNA, 20 bp, synthetic construct
  misc_feature 1..20: note = Synthetic construct
  source 1..20: mol_type = other DNA
cacggggtgcaatctcactg

SEQ ID NO: 1087 - DNA, 20 bp, synthetic construct
  misc_feature 1..20: note = Synthetic construct
  source 1..20: mol_type = other DNA
acggggtgcaatctcactgg

SEQ ID NO: 1088 - DNA, 20 bp, synthetic construct
  misc_feature 1..20: note = Synthetic construct
  source 1..20: mol_type = other DNA
cggggtgcaatctcactggg

SEQ ID NO: 1089 - DNA, 20 bp, synthetic construct
  misc_feature 1..20: note = Synthetic construct
  source 1..20: mol_type = other DNA
ggggtgcaatctcactggga

SEQ ID NO: 1090 - DNA, 20 bp, synthetic construct
  misc_feature 1..20: note = Synthetic construct
  source 1..20: mol_type = other DNA
gggtgcaatctcactgggac

SEQ ID NO: 1091 - DNA, 20 bp, synthetic construct
  misc_feature 1..20: note = Synthetic construct
  source 1..20: mol_type = other DNA
ggtgcaatctcactgggaca

SEQ ID NO: 1092 - DNA, 20 bp, synthetic construct
  misc_feature 1..20: note = Synthetic construct
  source 1..20: mol_type = other DNA
gtgcaatctcactgggacat

SEQ ID NO: 1093 - DNA, 20 bp, synthetic construct
  misc_feature 1..20: note = Synthetic construct
  source 1..20: mol_type = other DNA
tgcaatctcactgggacata

SEQ ID NO: 1094 - DNA, 20 bp, synthetic construct
  misc_feature 1..20: note = Synthetic construct
  source 1..20: mol_type = other DNA
gcaatctcactgggacatat

SEQ ID NO: 1095 - DNA, 20 bp, synthetic construct
  misc_feature 1..20: note = Synthetic construct
  source 1..20: mol_type = other DNA
caatctcactgggacatata

SEQ ID NO: 1096 - DNA, 20 bp, synthetic construct
  misc_feature 1..20: note = Synthetic construct
  source 1..20: mol_type = other DNA
aatctcactgggacatataa

SEQ ID NO: 1097 - DNA, 20 bp, synthetic construct
  misc_feature 1..20: note = Synthetic construct
  source 1..20: mol_type = other DNA
atctcactgggacatataat

SEQ ID NO: 1098 - DNA, 20 bp, synthetic construct
  misc_feature 1..20: note = Synthetic construct
  source 1..20: mol_type = other DNA
tctcactgggacatataata

SEQ ID NO: 1099 - DNA, 20 bp, synthetic construct
  misc_feature 1..20: note = Synthetic construct
  source 1..20: mol_type = other DNA
ctcactgggacatataatat

SEQ ID NO: 1100 - DNA, 20 bp, synthetic construct
  misc_feature 1..20: note = Synthetic construct
  source 1..20: mol_type = other DNA
tcactgggacatataatatc

SEQ ID NO: 1101 - DNA, 20 bp, synthetic construct
  misc_feature 1..20: note = Synthetic construct
  source 1..20: mol_type = other DNA
cactgggacatataatatcg

SEQ ID NO: 1102 - DNA, 20 bp, synthetic construct
  misc_feature 1..20: note = Synthetic construct
  source 1..20: mol_type = other DNA
actgggacatataatatcgt

SEQ ID NO: 1103 - DNA, 20 bp, synthetic construct
  misc_feature 1..20: note = Synthetic construct
  source 1..20: mol_type = other DNA
ctgggacatataatatcgtc

SEQ ID NO: 1104 - DNA, 20 bp, synthetic construct
  misc_feature 1..20: note = Synthetic construct
  source 1..20: mol_type = other DNA
tgggacatataatatcgtcc

SEQ ID NO: 1105 - DNA, 20 bp, synthetic construct
  misc_feature 1..20: note = Synthetic construct
  source 1..20: mol_type = other DNA
gggacatataatatcgtccc

SEQ ID NO: 1106 - DNA, 20 bp, synthetic construct
  misc_feature 1..20: note = Synthetic construct
  source 1..20: mol_type = other DNA
ggacatataatatcgtcccc

SEQ ID NO: 1107 - DNA, 20 bp, synthetic construct
  misc_feature 1..20: note = Synthetic construct
  source 1..20: mol_type = other DNA
gacatataatatcgtccccg

SEQ ID NO: 1108 - DNA, 20 bp, synthetic construct
  misc_feature 1..20: note = Synthetic construct
  source 1..20: mol_type = other DNA
acatataatatcgtccccgt

SEQ ID NO: 1109 - DNA, 20 bp, synthetic construct
  misc_feature 1..20: note = Synthetic construct
  source 1..20: mol_type = other DNA
catataatatcgtccccgta

SEQ ID NO: 1110 - DNA, 20 bp, synthetic construct
  misc_feature 1..20: note = Synthetic construct
  source 1..20: mol_type = other DNA
atataatatcgtccccgtag

SEQ ID NO: 1111 - DNA, 20 bp, synthetic construct
  misc_feature 1..20: note = Synthetic construct
  source 1..20: mol_type = other DNA
tataatatcgtccccgtaga

SEQ ID NO: 1112 - DNA, 20 bp, synthetic construct
  misc_feature 1..20: note = Synthetic construct
  source 1..20: mol_type = other DNA
ataatatcgtccccgtagat

SEQ ID NO: 1113 - DNA, 20 bp, synthetic construct
  misc_feature 1..20: note = Synthetic construct
  source 1..20: mol_type = other DNA
taatatcgtccccgtagatg

SEQ ID NO: 1114 - DNA, 20 bp, synthetic construct
  misc_feature 1..20: note = Synthetic construct
  source 1..20: mol_type = other DNA
aatatcgtccccgtagatgc

SEQ ID NO: 1115 - DNA, 20 bp, synthetic construct
  misc_feature 1..20: note = Synthetic construct
  source 1..20: mol_type = other DNA
atatcgtccccgtagatgcc

SEQ ID NO: 1116 - DNA, 20 bp, synthetic construct
  misc_feature 1..20: note = Synthetic construct
  source 1..20: mol_type = other DNA
tatcgtccccgtagatgcct

SEQ ID NO: 1117 - DNA, 20 bp, synthetic construct
  misc_feature 1..20: note = Synthetic construct
  source 1..20: mol_type = other DNA
atcgtccccgtagatgccta

SEQ ID NO: 1118 - DNA, 20 bp, synthetic construct
  misc_feature 1..20: note = Synthetic construct
  source 1..20: mol_type = other DNA
tcgtccccgtagatgcctat

SEQ ID NO: 1119 - DNA, 20 bp, synthetic construct
  misc_feature 1..20: note = Synthetic construct
  source 1..20: mol_type = other DNA
cgtccccgtagatgcctatg

SEQ ID NO: 1120 - DNA, 20 bp, synthetic construct
  misc_feature 1..20: note = Synthetic construct
  source 1..20: mol_type = other DNA
gtccccgtagatgcctatgg

SEQ ID NO: 1121 - DNA, 20 bp, synthetic construct
  misc_feature 1..20: note = Synthetic construct
  source 1..20: mol_type = other DNA
tccccgtagatgcctatggt

SEQ ID NO: 1122 - DNA, 20 bp, synthetic construct
  misc_feature 1..20: note = Synthetic construct
  source 1..20: mol_type = other DNA
ccccgtagatgcctatggtt

SEQ ID NO: 1123 - DNA, 20 bp, synthetic construct
  misc_feature 1..20: note = Synthetic construct
  source 1..20: mol_type = other DNA
cccgtagatgcctatggttc

SEQ ID NO: 1124 - DNA, 20 bp, synthetic construct
  misc_feature 1..20: note = Synthetic construct
  source 1..20: mol_type = other DNA
ccgtagatgcctatggttcc

SEQ ID NO: 1125 - DNA, 20 bp, synthetic construct
  misc_feature 1..20: note = Synthetic construct
  source 1..20: mol_type = other DNA
cgtagatgcctatggttccg

SEQ ID NO: 1126 - DNA, 20 bp, synthetic construct
  misc_feature 1..20: note = Synthetic construct
  source 1..20: mol_type = other DNA
gtagatgcctatggttccgg

SEQ ID NO: 1127 - DNA, 20 bp, synthetic construct
  misc_feature 1..20: note = Synthetic construct
  source 1..20: mol_type = other DNA
tagatgcctatggttccggc

SEQ ID NO: 1128 - DNA, 20 bp, synthetic construct
  misc_feature 1..20: note = Synthetic construct
  source 1..20: mol_type = other DNA
agatgcctatggttccggcg

SEQ ID NO: 1129 - DNA, 20 bp, synthetic construct
  misc_feature 1..20: note = Synthetic construct
  source 1..20: mol_type = other DNA
gatgcctatggttccggcgt

SEQ ID NO: 1130 - DNA, 20 bp, synthetic construct
  misc_feature 1..20: note = Synthetic construct
  source 1..20: mol_type = other DNA
atgcctatggttccggcgtt

SEQ ID NO: 1131 - DNA, 20 bp, synthetic construct
  misc_feature 1..20: note = Synthetic construct
  source 1..20: mol_type = other DNA
tgcctatggttccggcgtta

SEQ ID NO: 1132 - DNA, 20 bp, synthetic construct
  misc_feature 1..20: note = Synthetic construct
  source 1..20: mol_type = other DNA
gcctatggttccggcgttac

SEQ ID NO: 1133 - DNA, 20 bp, synthetic construct
  misc_feature 1..20: note = Synthetic construct
  source 1..20: mol_type = other DNA
cctatggttccggcgttacc

SEQ ID NO: 1134 - DNA, 20 bp, synthetic construct
  misc_feature 1..20: note = Synthetic construct
  source 1..20: mol_type = other DNA
ctatggttccggcgttacca

SEQ ID NO: 1135 - DNA, 20 bp, synthetic construct
  misc_feature 1..20: note = Synthetic construct
  source 1..20: mol_type = other DNA
tatggttccggcgttaccaa

SEQ ID NO: 1136 - DNA, 20 bp, synthetic construct
  misc_feature 1..20: note = Synthetic construct
  source 1..20: mol_type = other DNA
atggttccggcgttaccaaa

SEQ ID NO: 1137 - DNA, 20 bp, synthetic construct
  misc_feature 1..20: note = Synthetic construct
  source 1..20: mol_type = other DNA
tggttccggcgttaccaaaa

SEQ ID NO: 1138 - DNA, 20 bp, synthetic construct
  misc_feature 1..20: note = Synthetic construct
  source 1..20: mol_type = other DNA
ggttccggcgttaccaaaat

SEQ ID NO: 1139 - DNA, 20 bp, synthetic construct
  misc_feature 1..20: note = Synthetic construct
  source 1..20: mol_type = other DNA
gttccggcgttaccaaaatg

SEQ ID NO: 1140 - DNA, 20 bp, synthetic construct
  misc_feature 1..20: note = Synthetic construct
  source 1..20: mol_type = other DNA
ttccggcgttaccaaaatgg

SEQ ID NO: 1141 - DNA, 20 bp, synthetic construct
  misc_feature 1..20: note = Synthetic construct
  source 1..20: mol_type = other DNA
tccggcgttaccaaaatgga

SEQ ID NO: 1142 - DNA, 20 bp, synthetic construct
  misc_feature 1..20: note = Synthetic construct
  source 1..20: mol_type = other DNA
ccggcgttaccaaaatggat

SEQ ID NO: 1143 - DNA, 20 bp, synthetic construct
  misc_feature 1..20: note = Synthetic construct
  source 1..20: mol_type = other DNA
cggcgttaccaaaatggatt

SEQ ID NO: 1144 - DNA, 20 bp, synthetic construct
  misc_feature 1..20: note = Synthetic construct
  source 1..20: mol_type = other DNA
ggcgttaccaaaatggattt

SEQ ID NO: 1145 - DNA, 20 bp, synthetic construct
  misc_feature 1..20: note = Synthetic construct
  source 1..20: mol_type = other DNA
gcgttaccaaaatggatttg

SEQ ID NO: 1146 - DNA, 20 bp, synthetic construct
  misc_feature 1..20: note = Synthetic construct
  source 1..20: mol_type = other DNA
cgttaccaaaatggatttgg

SEQ ID NO: 1147 - DNA, 20 bp, synthetic construct
  misc_feature 1..20: note = Synthetic construct
  source 1..20: mol_type = other DNA
gttaccaaaatggatttggg

SEQ ID NO: 1148 - DNA, 20 bp, synthetic construct
  misc_feature 1..20: note = Synthetic construct
  source 1..20: mol_type = other DNA
ttaccaaaatggatttgggt

SEQ ID NO: 1149 - DNA, 20 bp, synthetic construct
  misc_feature 1..20: note = Synthetic construct
  source 1..20: mol_type = other DNA
taccaaaatggatttgggtc

SEQ ID NO: 1150 - DNA, 20 bp, synthetic construct
  misc_feature 1..20: note = Synthetic construct
  source 1..20: mol_type = other DNA
accaaaatggatttgggtcg

SEQ ID NO: 1151 - DNA, 20 bp, synthetic construct
  misc_feature 1..20: note = Synthetic construct
  source 1..20: mol_type = other DNA
ccaaaatggatttgggtcgc

SEQ ID NO: 1152 - DNA, 20 bp, synthetic construct
  misc_feature 1..20: note = Synthetic construct
  source 1..20: mol_type = other DNA
caaaatggatttgggtcgct

SEQ ID NO: 1153 - DNA, 20 bp, synthetic construct
  misc_feature 1..20: note = Synthetic construct
  source 1..20: mol_type = other DNA
aaaatggatttgggtcgctt

SEQ ID NO: 1154 - DNA, 20 bp, synthetic construct
  misc_feature 1..20: note = Synthetic construct
  source 1..20: mol_type = other DNA
aaatggatttgggtcgcttt

SEQ ID NO: 1155 - DNA, 20 bp, synthetic construct
  misc_feature 1..20: note = Synthetic construct
  source 1..20: mol_type = other DNA
aatggatttgggtcgctttg

SEQ ID NO: 1156 - DNA, 20 bp, synthetic construct
  misc_feature 1..20: note = Synthetic construct
  source 1..20: mol_type = other DNA
atggatttgggtcgctttga

SEQ ID NO: 1157 - DNA, 20 bp, synthetic construct
  misc_feature 1..20: note = Synthetic construct
  source 1..20: mol_type = other DNA
tggatttgggtcgctttgac

SEQ ID NO: 1158 - DNA, 20 bp, synthetic construct
  misc_feature 1..20: note = Synthetic construct
  source 1..20: mol_type = other DNA
ggatttgggtcgctttgact

SEQ ID NO: 1159 - DNA, 20 bp, synthetic construct
  misc_feature 1..20: note = Synthetic construct
  source 1..20: mol_type = other DNA
gatttgggtcgctttgacta

SEQ ID NO: 1160 - DNA, 20 bp, synthetic construct
  misc_feature 1..20: note = Synthetic construct
  source 1..20: mol_type = other DNA
atttgggtcgctttgactat

SEQ ID NO: 1161 - DNA, 20 bp, synthetic construct
  misc_feature 1..20: note = Synthetic construct
  source 1..20: mol_type = other DNA
tttgggtcgctttgactatt

SEQ ID NO: 1162 - DNA, 20 bp, synthetic construct
  misc_feature 1..20: note = Synthetic construct
  source 1..20: mol_type = other DNA
ttgggtcgctttgactattg

SEQ ID NO: 1163 - DNA, 20 bp, synthetic construct
  misc_feature 1..20: note = Synthetic construct
  source 1..20: mol_type = other DNA
tgggtcgctttgactattgc

SEQ ID NO: 1164 - DNA, 20 bp, synthetic construct
  misc_feature 1..20: note = Synthetic construct
  source 1..20: mol_type = other DNA
gggtcgctttgactattgcc

SEQ ID NO: 1165 - DNA, 20 bp, synthetic construct
  misc_feature 1..20: note = Synthetic construct
  source 1..20: mol_type = other DNA
ggtcgctttgactattgccc

SEQ ID NO: 1166 - DNA, 20 bp, synthetic construct
  misc_feature 1..20: note = Synthetic construct
  source 1..20: mol_type = other DNA
gtcgctttgactattgccca

SEQ ID NO: 1167 - DNA, 20 bp, synthetic construct
  misc_feature 1..20: note = Synthetic construct
  source 1..20: mol_type = other DNA
tcgctttgactattgcccag

SEQ ID NO: 1168 - DNA, 20 bp, synthetic construct
  misc_feature 1..20: note = Synthetic construct
  source 1..20: mol_type = other DNA
cgctttgactattgcccaga

SEQ ID NO: 1169 - DNA, 20 bp, synthetic construct
  misc_feature 1..20: note = Synthetic construct
  source 1..20: mol_type = other DNA
gctttgactattgcccagaa

SEQ ID NO: 1170 - DNA, 20 bp, synthetic construct
  misc_feature 1..20: note = Synthetic construct
  source 1..20: mol_type = other DNA
ctttgactattgcccagaat

SEQ ID NO: 1171 - DNA, 20 bp, synthetic construct
  misc_feature 1..20: note = Synthetic construct
  source 1..20: mol_type = other DNA
tttgactattgcccagaata

SEQ ID NO: 1172 - DNA, 20 bp, synthetic construct
  misc_feature 1..20: note = Synthetic construct
  source 1..20: mol_type = other DNA
ttgactattgcccagaatat

SEQ ID NO: 1173 - DNA, 20 bp, synthetic construct
  misc_feature 1..20: note = Synthetic construct
  source 1..20: mol_type = other DNA
tgactattgcccagaatatc

SEQ ID NO: 1174 - DNA, 20 bp, synthetic construct
  misc_feature 1..20: note = Synthetic construct
  source 1..20: mol_type = other DNA
gactattgcccagaatatca

SEQ ID NO: 1175 - DNA, 20 bp, synthetic construct
  misc_feature 1..20: note = Synthetic construct
  source 1..20: mol_type = other DNA
actattgcccagaatatcat

SEQ ID NO: 1176 - DNA, 20 bp, synthetic construct
  misc_feature 1..20: note = Synthetic construct
  source 1..20: mol_type = other DNA
ctattgcccagaatatcatg

SEQ ID NO: 1177 - DNA, 20 bp, synthetic construct
  misc_feature 1..20: note = Synthetic construct
  source 1..20: mol_type = other DNA
tattgcccagaatatcatgg

SEQ ID NO: 1178 - DNA, 20 bp, synthetic construct
  misc_feature 1..20: note = Synthetic construct
  source 1..20: mol_type = other DNA
attgcccagaatatcatgga

SEQ ID NO: 1179 - DNA, 20 bp, synthetic construct
  misc_feature 1..20: note = Synthetic construct
  source 1..20: mol_type = other DNA
ttgcccagaatatcatggac

SEQ ID NO: 1180 - DNA, 20 bp, synthetic construct
  misc_feature 1..20: note = Synthetic construct
  source 1..20: mol_type = other DNA
tgcccagaatatcatggact

SEQ ID NO: 1181 - DNA, 20 bp, synthetic construct
  misc_feature 1..20: note = Synthetic construct
  source 1..20: mol_type = other DNA
gcccagaatatcatggactc

SEQ ID NO: 1182 - DNA, 20 bp, synthetic construct
  misc_feature 1..20: note = Synthetic construct
  source 1..20: mol_type = other DNA
cccagaatatcatggactct

SEQ ID NO: 1183 - DNA, 20 bp, synthetic construct
  misc_feature 1..20: note = Synthetic construct
  source 1..20: mol_type = other DNA
ccagaatatcatggactcta

SEQ ID NO: 1184 - DNA, 20 bp, synthetic construct
  misc_feature 1..20: note = Synthetic construct
  source 1..20: mol_type = other DNA
cagaatatcatggactctag

SEQ ID NO: 1185 - DNA, 20 bp, synthetic construct
  misc_feature 1..20: note = Synthetic construct
  source 1..20: mol_type = other DNA
agaatatcatggactctagc

SEQ ID NO: 1186 - DNA, 20 bp, synthetic construct
  misc_feature 1..20: note = Synthetic construct
  source 1..20: mol_type = other DNA
gaatatcatggactctagct

SEQ ID NO: 1187 - DNA, 20 bp, synthetic construct
  misc_feature 1..20: note = Synthetic construct
  source 1..20: mol_type = other DNA
aatatcatggactctagctc

SEQ ID NO: 1188 - DNA, 20 bp, synthetic construct
  misc_feature 1..20: note = Synthetic construct
  source 1..20: mol_type = other DNA
atatcatggactctagctca

SEQ ID NO: 1189 - DNA, 20 bp, synthetic construct
  misc_feature 1..20: note = Synthetic construct
  source 1..20: mol_type = other DNA
tatcatggactctagctcaa

SEQ ID NO: 1190 - DNA, 20 bp, synthetic construct
  misc_feature 1..20: note = Synthetic construct
  source 1..20: mol_type = other DNA
atcatggactctagctcaaa

SEQ ID NO: 1191 - DNA, 20 bp, synthetic construct
  misc_feature 1..20: note = Synthetic construct
  source 1..20: mol_type = other DNA
tcatggactctagctcaaat

SEQ ID NO: 1192 - DNA, 20 bp, synthetic construct
  misc_feature 1..20: note = Synthetic construct
  source 1..20: mol_type = other DNA
catggactctagctcaaatg

SEQ ID NO: 1193 - DNA, 20 bp, synthetic construct
  misc_feature 1..20: note = Synthetic construct
  source 1..20: mol_type = other DNA
atggactctagctcaaatgt

SEQ ID NO: 1194 - DNA, 20 bp, synthetic construct
  misc_feature 1..20: note = Synthetic construct
  source 1..20: mol_type = other DNA
tggactctagctcaaatgtg

SEQ ID NO: 1195 - DNA, 20 bp, synthetic construct
  misc_feature 1..20: note = Synthetic construct
  source 1..20: mol_type = other DNA
ggactctagctcaaatgtga

SEQ ID NO: 1196 - DNA, 20 bp, synthetic construct
  misc_feature 1..20: note = Synthetic construct
  source 1..20: mol_type = other DNA
gactctagctcaaatgtgaa

SEQ ID NO: 1197 - DNA, 20 bp, synthetic construct
  misc_feature 1..20: note = Synthetic construct
  source 1..20: mol_type = other DNA
actctagctcaaatgtgaac

SEQ ID NO: 1198 - DNA, 20 bp, synthetic construct
  misc_feature 1..20: note = Synthetic construct
  source 1..20: mol_type = other DNA
ctctagctcaaatgtgaacc

SEQ ID NO: 1199 - DNA, 20 bp, synthetic construct
  misc_feature 1..20: note = Synthetic construct
  source 1..20: mol_type = other DNA
tctagctcaaatgtgaaccc

SEQ ID NO: 1200 - DNA, 20 bp, synthetic construct
  misc_feature 1..20: note = Synthetic construct
  source 1..20: mol_type = other DNA
ctagctcaaatgtgaaccca

SEQ ID NO: 1201 - DNA, 20 bp, synthetic construct
  misc_feature 1..20: note = Synthetic construct
  source 1..20: mol_type = other DNA
tagctcaaatgtgaacccat

SEQ ID NO: 1202 - DNA, 20 bp, synthetic construct
  misc_feature 1..20: note = Synthetic construct
  source 1..20: mol_type = other DNA
agctcaaatgtgaacccatt

SEQ ID NO: 1203 - DNA, 20 bp, synthetic construct
  misc_feature 1..20: note = Synthetic construct
  source 1..20: mol_type = other DNA
gctcaaatgtgaacccattt

SEQ ID NO: 1204 - DNA, 20 bp, synthetic construct
  misc_feature 1..20: note = Synthetic construct
  source 1..20: mol_type = other DNA
ctcaaatgtgaacccatttc

SEQ ID NO: 1205 - DNA, 20 bp, synthetic construct
  misc_feature 1..20: note = Synthetic construct
  source 1..20: mol_type = other DNA
tcaaatgtgaacccatttcc

SEQ ID NO: 1206 - DNA, 20 bp, synthetic construct
  misc_feature 1..20: note = Synthetic construct
  source 1..20: mol_type = other DNA
caaatgtgaacccatttccc

SEQ ID NO: 1207 - DNA, 20 bp, synthetic construct
  misc_feature 1..20: note = Synthetic construct
  source 1..20: mol_type = other DNA
aaatgtgaacccatttccca

SEQ ID NO: 1208 - DNA, 20 bp, synthetic construct
  misc_feature 1..20: note = Synthetic construct
  source 1..20: mol_type = other DNA
aatgtgaacccatttcccat

SEQ ID NO: 1209 - DNA, 20 bp, synthetic construct
  misc_feature 1..20: note = Synthetic construct
  source 1..20: mol_type = other DNA
atgtgaacccatttcccatt

SEQ ID NO: 1210 - DNA, 20 bp, synthetic construct
  misc_feature 1..20: note = Synthetic construct
  source 1..20: mol_type = other DNA
tgtgaacccatttcccattg

SEQ ID NO: 1211 - DNA, 20 bp, synthetic construct
  misc_feature 1..20: note = Synthetic construct
  source 1..20: mol_type = other DNA
gtgaacccatttcccattgt

SEQ ID NO: 1212 - DNA, 20 bp, synthetic construct
  misc_feature 1..20: note = Synthetic construct
  source 1..20: mol_type = other DNA
tgaacccatttcccattgtg

SEQ ID NO: 1213 - DNA, 20 bp, synthetic construct
  misc_feature 1..20: note = Synthetic construct
  source 1..20: mol_type = other DNA
gaacccatttcccattgtgg

SEQ ID NO: 1214 - DNA, 20 bp, synthetic construct
  misc_feature 1..20: note = Synthetic construct
  source 1..20: mol_type = other DNA
aacccatttcccattgtgga

SEQ ID NO: 1215 - DNA, 20 bp, synthetic construct
  misc_feature 1..20: note = Synthetic construct
  source 1..20: mol_type = other DNA
acccatttcccattgtggaa

SEQ ID NO: 1216 - DNA, 20 bp, synthetic construct
  misc_feature 1..20: note = Synthetic construct
  source 1..20: mol_type = other DNA
cccatttcccattgtggaaa

SEQ ID NO: 1217 - DNA, 20 bp, synthetic construct
  misc_feature 1..20: note = Synthetic construct
  source 1..20: mol_type = other DNA
ccatttcccattgtggaaaa

SEQ ID NO: 1218 - DNA, 20 bp, synthetic construct
  misc_feature 1..20: note = Synthetic construct
  source 1..20: mol_type = other DNA
catttcccattgtggaaaat

SEQ ID NO: 1219 - DNA, 20 bp, synthetic construct
  misc_feature 1..20: note = Synthetic construct
  source 1..20: mol_type = other DNA
atttcccattgtggaaaata

SEQ ID NO: 1220 - DNA, 20 bp, synthetic construct
  misc_feature 1..20: note = Synthetic construct
  source 1..20: mol_type = other DNA
tttcccattgtggaaaatag

SEQ ID NO: 1221 - DNA, 20 bp, synthetic construct
  misc_feature 1..20: note = Synthetic construct
  source 1..20: mol_type = other DNA
ttcccattgtggaaaatagt

SEQ ID NO: 1222 - DNA, 20 bp, synthetic construct
  misc_feature 1..20: note = Synthetic construct
  source 1..20: mol_type = other DNA
tcccattgtggaaaatagtt

SEQ ID NO: 1223 - DNA, 20 bp, synthetic construct
  misc_feature 1..20: note = Synthetic construct
  source 1..20: mol_type = other DNA
cccattgtggaaaatagttc

SEQ ID NO: 1224 - DNA, 20 bp, synthetic construct
  misc_feature 1..20: note = Synthetic construct
  source 1..20: mol_type = other DNA
ccattgtggaaaatagttcc

SEQ ID NO: 1225 - DNA, 20 bp, synthetic construct
  misc_feature 1..20: note = Synthetic construct
  source 1..20: mol_type = other DNA
cattgtggaaaatagttccc

SEQ ID NO: 1226 - DNA, 20 bp, synthetic construct
  misc_feature 1..20: note = Synthetic construct
  source 1..20: mol_type = other DNA
attgtggaaaatagttccca

SEQ ID NO: 1227 - DNA, 20 bp, synthetic construct
  misc_feature 1..20: note = Synthetic construct
  source 1..20: mol_type = other DNA
ttgtggaaaatagttcccat

SEQ ID NO: 1228 - DNA, 20 bp, synthetic construct
  misc_feature 1..20: note = Synthetic construct
  source 1..20: mol_type = other DNA
tgtggaaaatagttcccatc

SEQ ID NO: 1229 - DNA, 20 bp, synthetic construct
  misc_feature 1..20: note = Synthetic construct
  source 1..20: mol_type = other DNA
gtggaaaatagttcccatcg

SEQ ID NO: 1230 - DNA, 20 bp, synthetic construct
  misc_feature 1..20: note = Synthetic construct
  source 1..20: mol_type = other DNA
tggaaaatagttcccatcgt

SEQ ID NO: 1231 - DNA, 20 bp, synthetic construct
  misc_feature 1..20: note = Synthetic construct
  source 1..20: mol_type = other DNA
ggaaaatagttcccatcgta

SEQ ID NO: 1232 - DNA, 20 bp, synthetic construct
  misc_feature 1..20: note = Synthetic construct
  source 1..20: mol_type = other DNA
gaaaatagttcccatcgtat

SEQ ID NO: 1233 - DNA, 20 bp, synthetic construct
  misc_feature 1..20: note = Synthetic construct
  source 1..20: mol_type = other DNA
aaaatagttcccatcgtatc

SEQ ID NO: 1234 - DNA, 20 bp, synthetic construct
  misc_feature 1..20: note = Synthetic construct
  source 1..20: mol_type = other DNA
aaatagttcccatcgtatcg

SEQ ID NO: 1235 - DNA, 20 bp, synthetic construct
  misc_feature 1..20: note = Synthetic construct
  source 1..20: mol_type = other DNA
aatagttcccatcgtatcgt

SEQ ID NO: 1236 - DNA, 20 bp, synthetic construct
  misc_feature 1..20: note = Synthetic construct
  source 1..20: mol_type = other DNA
atagttcccatcgtatcgtc

SEQ ID NO: 1237 - DNA, 20 bp, synthetic construct
  misc_feature 1..20: note = Synthetic construct
  source 1..20: mol_type = other DNA
tagttcccatcgtatcgtct

SEQ ID NO: 1238 - DNA, 20 bp, synthetic construct
  misc_feature 1..20: note = Synthetic construct
  source 1..20: mol_type = other DNA
agttcccatcgtatcgtctc

SEQ ID NO: 1239 - DNA, 20 bp, synthetic construct
  misc_feature 1..20: note = Synthetic construct
  source 1..20: mol_type = other DNA
gttcccatcgtatcgtctcg

SEQ ID NO: 1240 - DNA, 20 bp, synthetic construct
  misc_feature 1..20: note = Synthetic construct
  source 1..20: mol_type = other DNA
ttcccatcgtatcgtctcgc

SEQ ID NO: 1241 - DNA, 20 bp, synthetic construct
  misc_feature 1..20: note = Synthetic construct
  source 1..20: mol_type = other DNA
tcccatcgtatcgtctcgcc

SEQ ID NO: 1242 - DNA, 20 bp, synthetic construct
  misc_feature 1..20: note = Synthetic construct
  source 1..20: mol_type = other DNA
cccatcgtatcgtctcgcca

SEQ ID NO: 1243 - DNA, 20 bp, synthetic construct
  misc_feature 1..20: note = Synthetic construct
  source 1..20: mol_type = other DNA
ccatcgtatcgtctcgccat

SEQ ID NO: 1244 - DNA, 20 bp, synthetic construct
  misc_feature 1..20: note = Synthetic construct
  source 1..20: mol_type = other DNA
catcgtatcgtctcgccatc

SEQ ID NO: 1245 - DNA, 20 bp, synthetic construct
  misc_feature 1..20: note = Synthetic construct
  source 1..20: mol_type = other DNA
atcgtatcgtctcgccatct

SEQ ID NO: 1246 - DNA, 20 bp, synthetic construct
  misc_feature 1..20: note = Synthetic construct
  source 1..20: mol_type = other DNA
tcgtatcgtctcgccatcta

SEQ ID NO: 1247 - DNA, 20 bp, synthetic construct
  misc_feature 1..20: note = Synthetic construct
  source 1..20: mol_type = other DNA
cgtatcgtctcgccatctac

SEQ ID NO: 1248 - DNA, 20 bp, synthetic construct
  misc_feature 1..20: note = Synthetic construct
  source 1..20: mol_type = other DNA
gtatcgtctcgccatctacg

SEQ ID NO: 1249 - DNA, 20 bp, synthetic construct
  misc_feature 1..20: note = Synthetic construct
  source 1..20: mol_type = other DNA
tatcgtctcgccatctacga

SEQ ID NO: 1250 - DNA, 20 bp, synthetic construct
  misc_feature 1..20: note = Synthetic construct
  source 1..20: mol_type = other DNA
atcgtctcgccatctacgat

SEQ ID NO: 1251 - DNA, 20 bp, synthetic construct
  misc_feature 1..20: note = Synthetic construct
  source 1..20: mol_type = other DNA
tcgtctcgccatctacgatt

SEQ ID NO: 1252 - DNA, 20 bp, synthetic construct
  misc_feature 1..20: note = Synthetic construct
  source 1..20: mol_type = other DNA
cgtctcgccatctacgattc

SEQ ID NO: 1253 - DNA, 20 bp, synthetic construct
  misc_feature 1..20: note = Synthetic construct
  source 1..20: mol_type = other DNA
gtctcgccatctacgattcc

SEQ ID NO: 1254 - DNA, 20 bp, synthetic construct
  misc_feature 1..20: note = Synthetic construct
  source 1..20: mol_type = other DNA
tctcgccatctacgattccg

SEQ ID NO: 1255 - DNA, 20 bp, synthetic construct
  misc_feature 1..20: note = Synthetic construct
  source 1..20: mol_type = other DNA
ctcgccatctacgattccgt

SEQ ID NO: 1256 - DNA, 20 bp, synthetic construct
  misc_feature 1..20: note = Synthetic construct
  source 1..20: mol_type = other DNA
tcgccatctacgattccgta

SEQ ID NO: 1257 - DNA, 20 bp, synthetic construct
  misc_feature 1..20: note = Synthetic construct
  source 1..20: mol_type = other DNA
cgccatctacgattccgtag

SEQ ID NO: 1258 - DNA, 20 bp, synthetic construct
  misc_feature 1..20: note = Synthetic construct
  source 1..20: mol_type = other DNA
gccatctacgattccgtagt

SEQ ID NO: 1259 - DNA, 20 bp, synthetic construct
  misc_feature 1..20: note = Synthetic construct
  source 1..20: mol_type = other DNA
ccatctacgattccgtagtg

SEQ ID NO: 1260 - DNA, 20 bp, synthetic construct
  misc_feature 1..20: note = Synthetic construct
  source 1..20: mol_type = other DNA
catctacgattccgtagtgt

SEQ ID NO: 1261 - DNA, 20 bp, synthetic construct
  misc_feature 1..20: note = Synthetic construct
  source 1..20: mol_type = other DNA
atctacgattccgtagtgtg

SEQ ID NO: 1262 - DNA, 20 bp, synthetic construct
  misc_feature 1..20: note = Synthetic construct
  source 1..20: mol_type = other DNA
tctacgattccgtagtgtga

SEQ ID NO: 1263 - DNA, 20 bp, synthetic construct
  misc_feature 1..20: note = Synthetic construct
  source 1..20: mol_type = other DNA
ctacgattccgtagtgtgag

SEQ ID NO: 1264 - DNA, 20 bp, synthetic construct
  misc_feature 1..20: note = Synthetic construct
  source 1..20: mol_type = other DNA
tacgattccgtagtgtgagc

SEQ ID NO: 1265 - DNA, 20 bp, synthetic construct
  misc_feature 1..20: note = Synthetic construct
  source 1..20: mol_type = other DNA
acgattccgtagtgtgagcg

SEQ ID NO: 1266 - DNA, 20 bp, synthetic construct
  misc_feature 1..20: note = Synthetic construct
  source 1..20: mol_type = other DNA
cgattccgtagtgtgagcgg

SEQ ID NO: 1267 - DNA, 20 bp, synthetic construct
  misc_feature 1..20: note = Synthetic construct
  source 1..20: mol_type = other DNA
gattccgtagtgtgagcgga

SEQ ID NO: 1268 - DNA, 20 bp, synthetic construct
  misc_feature 1..20: note = Synthetic construct
  source 1..20: mol_type = other DNA
attccgtagtgtgagcggat

SEQ ID NO: 1269 - DNA, 20 bp, synthetic construct
  misc_feature 1..20: note = Synthetic construct
  source 1..20: mol_type = other DNA
ttccgtagtgtgagcggata

SEQ ID NO: 1270 - DNA, 20 bp, synthetic construct
  misc_feature 1..20: note = Synthetic construct
  source 1..20: mol_type = other DNA
tccgtagtgtgagcggatac

SEQ ID NO: 1271 - DNA, 20 bp, synthetic construct
  misc_feature 1..20: note = Synthetic construct
  source 1..20: mol_type = other DNA
ccgtagtgtgagcggatacg

SEQ ID NO: 1272 - DNA, 20 bp, synthetic construct
  misc_feature 1..20: note = Synthetic construct
  source 1..20: mol_type = other DNA
cgtagtgtgagcggatacga

SEQ ID NO: 1273 - DNA, 20 bp, synthetic construct
  misc_feature 1..20: note = Synthetic construct
  source 1..20: mol_type = other DNA
gtagtgtgagcggatacgat

SEQ ID NO: 1274 - DNA, 20 bp, synthetic construct
  misc_feature 1..20: note = Synthetic construct
  source 1..20: mol_type = other DNA
tagtgtgagcggatacgatc

SEQ ID NO: 1275 - DNA, 20 bp, synthetic construct
  misc_feature 1..20: note = Synthetic construct
  source 1..20: mol_type = other DNA
agtgtgagcggatacgatcg

SEQ ID NO: 1276 - DNA, 20 bp, synthetic construct
  misc_feature 1..20: note = Synthetic construct
  source 1..20: mol_type = other DNA
gtgtgagcggatacgatcga

SEQ ID NO: 1277 - DNA, 20 bp, synthetic construct
  misc_feature 1..20: note = Synthetic construct
  source 1..20: mol_type = other DNA
tgtgagcggatacgatcgag

SEQ ID NO: 1278 - DNA, 20 bp, synthetic construct
  misc_feature 1..20: note = Synthetic construct
  source 1..20: mol_type = other DNA
gtgagcggatacgatcgaga

SEQ ID NO: 1279 - DNA, 20 bp, synthetic construct
  misc_feature 1..20: note = Synthetic construct
  source 1..20: mol_type = other DNA
tgagcggatacgatcgagat

SEQ ID NO: 1280 - DNA, 20 bp, synthetic construct
  misc_feature 1..20: note = Synthetic construct
  source 1..20: mol_type = other DNA
gagcggatacgatcgagata

SEQ ID NO: 1281 - DNA, 20 bp, synthetic construct
  misc_feature 1..20: note = Synthetic construct
  source 1..20: mol_type = other DNA
agcggatacgatcgagatat

SEQ ID NO: 1282 - DNA, 20 bp, synthetic construct
  misc_feature 1..20: note = Synthetic construct
  source 1..20: mol_type = other DNA
gcggatacgatcgagatatg

SEQ ID NO: 1283 - DNA, 20 bp, synthetic construct
  misc_feature 1..20: note = Synthetic construct
  source 1..20: mol_type = other DNA
cggatacgatcgagatatga

SEQ ID NO: 1284 - DNA, 20 bp, synthetic construct
  misc_feature 1..20: note = Synthetic construct
  source 1..20: mol_type = other DNA
ggatacgatcgagatatgaa

SEQ ID NO: 1285 - DNA, 20 bp, synthetic construct
  misc_feature 1..20: note = Synthetic construct
  source 1..20: mol_type = other DNA
gatacgatcgagatatgaat

SEQ ID NO: 1286 - DNA, 20 bp, synthetic construct
  misc_feature 1..20: note = Synthetic construct
  source 1..20: mol_type = other DNA
atacgatcgagatatgaata

SEQ ID NO: 1287 - DNA, 20 bp, synthetic construct
  misc_feature 1..20: note = Synthetic construct
  source 1..20: mol_type = other DNA
tacgatcgagatatgaatat

SEQ ID NO: 1288 - DNA, 20 bp, synthetic construct
  misc_feature 1..20: note = Synthetic construct
  source 1..20: mol_type = other DNA
acgatcgagatatgaatata

SEQ ID NO: 1289 - DNA, 20 bp, synthetic construct
  misc_feature 1..20: note = Synthetic construct
  source 1..20: mol_type = other DNA
cgatcgagatatgaatatag

SEQ ID NO: 1290 - DNA, 20 bp, synthetic construct
  misc_feature 1..20: note = Synthetic construct
  source 1..20: mol_type = other DNA
gatcgagatatgaatatagc

SEQ ID NO: 1291 - DNA, 20 bp, synthetic construct
  misc_feature 1..20: note = Synthetic construct
  source 1..20: mol_type = other DNA
atcgagatatgaatatagct

SEQ ID NO: 1292 - DNA, 20 bp, synthetic construct
  misc_feature 1..20: note = Synthetic construct
  source 1..20: mol_type = other DNA
tcgagatatgaatatagctc

SEQ ID NO: 1293 - DNA, 20 bp, synthetic construct
  misc_feature 1..20: note = Synthetic construct
  source 1..20: mol_type = other DNA
cgagatatgaatatagctct

SEQ ID NO: 1294 - DNA, 20 bp, synthetic construct
  misc_feature 1..20: note = Synthetic construct
  source 1..20: mol_type = other DNA
gagatatgaatatagctctg

SEQ ID NO: 1295 - DNA, 20 bp, synthetic construct
  misc_feature 1..20: note = Synthetic construct
  source 1..20: mol_type = other DNA
agatatgaatatagctctgg

SEQ ID NO: 1296 - DNA, 20 bp, synthetic construct
  misc_feature 1..20: note = Synthetic construct
  source 1..20: mol_type = other DNA
gatatgaatatagctctggt

SEQ ID NO: 1297 - DNA, 20 bp, synthetic construct
  misc_feature 1..20: note = Synthetic construct
  source 1..20: mol_type = other DNA
atatgaatatagctctggtg

SEQ ID NO: 1298 - DNA, 20 bp, synthetic construct
  misc_feature 1..20: note = Synthetic construct
  source 1..20: mol_type = other DNA
tatgaatatagctctggtgg

SEQ ID NO: 1299 - DNA, 20 bp, synthetic construct
  misc_feature 1..20: note = Synthetic construct
  source 1..20: mol_type = other DNA
atgaatatagctctggtggg

SEQ ID NO: 1300 - DNA, 20 bp, synthetic construct
  misc_feature 1..20: note = Synthetic construct
  source 1..20: mol_type = other DNA
tgaatatagctctggtggga

SEQ ID NO: 1301 - DNA, 20 bp, synthetic construct
  misc_feature 1..20: note = Synthetic construct
  source 1..20: mol_type = other DNA
gaatatagctctggtgggag

SEQ ID NO: 1302 - DNA, 20 bp, synthetic construct
  misc_feature 1..20: note = Synthetic construct
  source 1..20: mol_type = other DNA
aatatagctctggtgggaga

SEQ ID NO: 1303 - DNA, 20 bp, synthetic construct
  misc_feature 1..20: note = Synthetic construct
  source 1..20: mol_type = other DNA
atatagctctggtgggagaa

SEQ ID NO: 1304 - DNA, 20 bp, synthetic construct
  misc_feature 1..20: note = Synthetic construct
  source 1..20: mol_type = other DNA
tatagctctggtgggagaaa

SEQ ID NO: 1305 - DNA, 20 bp, synthetic construct
  misc_feature 1..20: note = Synthetic construct
  source 1..20: mol_type = other DNA
atagctctggtgggagaaaa

SEQ ID NO: 1306 - DNA, 20 bp, synthetic construct
  misc_feature 1..20: note = Synthetic construct
  source 1..20: mol_type = other DNA
tagctctggtgggagaaaac

SEQ ID NO: 1307 - DNA, 20 bp, synthetic construct
  misc_feature 1..20: note = Synthetic construct
  source 1..20: mol_type = other DNA
agctctggtgggagaaaact

SEQ ID NO: 1308 - DNA, 20 bp, synthetic construct
  misc_feature 1..20: note = Synthetic construct
  source 1..20: mol_type = other DNA
gctctggtgggagaaaactc

SEQ ID NO: 1309 - DNA, 20 bp, synthetic construct
  misc_feature 1..20: note = Synthetic construct
  source 1..20: mol_type = other DNA
ctctggtgggagaaaactcc

SEQ ID NO: 1310 - DNA, 20 bp, synthetic construct
  misc_feature 1..20: note = Synthetic construct
  source 1..20: mol_type = other DNA
tctggtgggagaaaactcca

SEQ ID NO: 1311 - DNA, 20 bp, synthetic construct
  misc_feature 1..20: note = Synthetic construct
  source 1..20: mol_type = other DNA
ctggtgggagaaaactccac

SEQ ID NO: 1312 - DNA, 20 bp, synthetic construct
  misc_feature 1..20: note = Synthetic construct
  source 1..20: mol_type = other DNA
tggtgggagaaaactccaca

SEQ ID NO: 1313 - DNA, 20 bp, synthetic construct
  misc_feature 1..20: note = Synthetic construct
  source 1..20: mol_type = other DNA
ggtgggagaaaactccacac

SEQ ID NO: 1314 - DNA, 20 bp, synthetic construct
  misc_feature 1..20: note = Synthetic construct
  source 1..20: mol_type = other DNA
gtgggagaaaactccacacc

SEQ ID NO: 1315 - DNA, 20 bp, synthetic construct
  misc_feature 1..20: note = Synthetic construct
  source 1..20: mol_type = other DNA
tgggagaaaactccacacca

SEQ ID NO: 1316 - DNA, 20 bp, synthetic construct
  misc_feature 1..20: note = Synthetic construct
  source 1..20: mol_type = other DNA
gggagaaaactccacaccag

SEQ ID NO: 1317 - DNA, 20 bp, synthetic construct
  misc_feature 1..20: note = Synthetic construct
  source 1..20: mol_type = other DNA
ggagaaaactccacaccagg

SEQ ID NO: 1318 - DNA, 20 bp, synthetic construct
  misc_feature 1..20: note = Synthetic construct
  source 1..20: mol_type = other DNA
gagaaaactccacaccaggc

SEQ ID NO: 1319 - DNA, 20 bp, synthetic construct
  misc_feature 1..20: note = Synthetic construct
  source 1..20: mol_type = other DNA
agaaaactccacaccaggcg

SEQ ID NO: 1320 - DNA, 20 bp, synthetic construct
  misc_feature 1..20: note = Synthetic construct
  source 1..20: mol_type = other DNA
gaaaactccacaccaggcga

SEQ ID NO: 1321 - DNA, 20 bp, synthetic construct
  misc_feature 1..20: note = Synthetic construct
  source 1..20: mol_type = other DNA
aaaactccacaccaggcgat

SEQ ID NO: 1322 - DNA, 20 bp, synthetic construct
  misc_feature 1..20: note = Synthetic construct
  source 1..20: mol_type = other DNA
aaactccacaccaggcgatc

SEQ ID NO: 1323 - DNA, 20 bp, synthetic construct
  misc_feature 1..20: note = Synthetic construct
  source 1..20: mol_type = other DNA
aactccacaccaggcgatcg

SEQ ID NO: 1324 - DNA, 20 bp, synthetic construct
  misc_feature 1..20: note = Synthetic construct
  source 1..20: mol_type = other DNA
actccacaccaggcgatcgg

SEQ ID NO: 1325 - DNA, 20 bp, synthetic construct
  misc_feature 1..20: note = Synthetic construct
  source 1..20: mol_type = other DNA
ctccacaccaggcgatcgga

SEQ ID NO: 1326 - DNA, 20 bp, synthetic construct
  misc_feature 1..20: note = Synthetic construct
  source 1..20: mol_type = other DNA
tccacaccaggcgatcggag

SEQ ID NO: 1327 - DNA, 20 bp, synthetic construct
  misc_feature 1..20: note = Synthetic construct
  source 1..20: mol_type = other DNA
ccacaccaggcgatcggaga

SEQ ID NO: 1328 - DNA, 20 bp, synthetic construct
  misc_feature 1..20: note = Synthetic construct
  source 1..20: mol_type = other DNA
cacaccaggcgatcggagat

SEQ ID NO: 1329 - DNA, 20 bp, synthetic construct
  misc_feature 1..20: note = Synthetic construct
  source 1..20: mol_type = other DNA
acaccaggcgatcggagatg

SEQ ID NO: 1330 - DNA, 20 bp, synthetic construct
  misc_feature 1..20: note = Synthetic construct
  source 1..20: mol_type = other DNA
caccaggcgatcggagatgg

SEQ ID NO: 1331 - DNA, 20 bp, synthetic construct
  misc_feature 1..20: note = Synthetic construct
  source 1..20: mol_type = other DNA
accaggcgatcggagatgga

SEQ ID NO: 1332 - DNA, 20 bp, synthetic construct
  misc_feature 1..20: note = Synthetic construct
  source 1..20: mol_type = other DNA
ccaggcgatcggagatggaa

SEQ ID NO: 1333 - DNA, 20 bp, synthetic construct
  misc_feature 1..20: note = Synthetic construct
  source 1..20: mol_type = other DNA
caggcgatcggagatggaat

SEQ ID NO: 1334 - DNA, 20 bp, synthetic construct
  misc_feature 1..20: note = Synthetic construct
  source 1..20: mol_type = other DNA
aggcgatcggagatggaatc

SEQ ID NO: 1335 - DNA, 20 bp, synthetic construct
  misc_feature 1..20: note = Synthetic construct
  source 1..20: mol_type = other DNA
ggcgatcggagatggaatcg

SEQ ID NO: 1336 - DNA, 20 bp, synthetic construct
  misc_feature 1..20: note = Synthetic construct
  source 1..20: mol_type = other DNA
gcgatcggagatggaatcgg

SEQ ID NO: 1337 - DNA, 20 bp, synthetic construct
  misc_feature 1..20: note = Synthetic construct
  source 1..20: mol_type = other DNA
cgatcggagatggaatcgga

SEQ ID NO: 1338 - DNA, 20 bp, synthetic construct
  misc_feature 1..20: note = Synthetic construct
  source 1..20: mol_type = other DNA
gatcggagatggaatcggat

SEQ ID NO: 1339 - DNA, 20 bp, synthetic construct
  misc_feature 1..20: note = Synthetic construct
  source 1..20: mol_type = other DNA
atcggagatggaatcggatg

SEQ ID NO: 1340 - DNA, 20 bp, synthetic construct
  misc_feature 1..20: note = Synthetic construct
  source 1..20: mol_type = other DNA
tcggagatggaatcggatgc

SEQ ID NO: 1341 - DNA, 20 bp, synthetic construct
  misc_feature 1..20: note = Synthetic construct
  source 1..20: mol_type = other DNA
cggagatggaatcggatgca

SEQ ID NO: 1342 - DNA, 20 bp, synthetic construct
  misc_feature 1..20: note = Synthetic construct
  source 1..20: mol_type = other DNA
ggagatggaatcggatgcag

SEQ ID NO: 1343 - DNA, 20 bp, synthetic construct
  misc_feature 1..20: note = Synthetic construct
  source 1..20: mol_type = other DNA
gagatggaatcggatgcaga

SEQ ID NO: 1344 - DNA, 20 bp, synthetic construct
  misc_feature 1..20: note = Synthetic construct
  source 1..20: mol_type = other DNA
agatggaatcggatgcagac

SEQ ID NO: 1345 - DNA, 20 bp, synthetic construct
  misc_feature 1..20: note = Synthetic construct
  source 1..20: mol_type = other DNA
gatggaatcggatgcagacg

SEQ ID NO: 1346 - DNA, 20 bp, synthetic construct
  misc_feature 1..20: note = Synthetic construct
  source 1..20: mol_type = other DNA
atggaatcggatgcagacga

SEQ ID NO: 1347 - DNA, 20 bp, synthetic construct
  misc_feature 1..20: note = Synthetic construct
  source 1..20: mol_type = other DNA
tggaatcggatgcagacgat

SEQ ID NO: 1348 - DNA, 20 bp, synthetic construct
  misc_feature 1..20: note = Synthetic construct
  source 1..20: mol_type = other DNA
ggaatcggatgcagacgata

SEQ ID NO: 1349 - DNA, 20 bp, synthetic construct
  misc_feature 1..20: note = Synthetic construct
  source 1..20: mol_type = other DNA
gaatcggatgcagacgataa

SEQ ID NO: 1350 - DNA, 20 bp, synthetic construct
  misc_feature 1..20: note = Synthetic construct
  source 1..20: mol_type = other DNA
aatcggatgcagacgataag

SEQ ID NO: 1351 - DNA, 20 bp, synthetic construct
  misc_feature 1..20: note = Synthetic construct
  source 1..20: mol_type = other DNA
atcggatgcagacgataagt

SEQ ID NO: 1352 - DNA, 20 bp, synthetic construct
  misc_feature 1..20: note = Synthetic construct
  source 1..20: mol_type = other DNA
tcggatgcagacgataagtc

SEQ ID NO: 1353 - DNA, 20 bp, synthetic construct
  misc_feature 1..20: note = Synthetic construct
  source 1..20: mol_type = other DNA
cggatgcagacgataagtct

SEQ ID NO: 1354 - DNA, 20 bp, synthetic construct
  misc_feature 1..20: note = Synthetic construct
  source 1..20: mol_type = other DNA
ggatgcagacgataagtcta

SEQ ID NO: 1355 - DNA, 20 bp, synthetic construct
  misc_feature 1..20: note = Synthetic construct
  source 1..20: mol_type = other DNA
gatgcagacgataagtctat

SEQ ID NO: 1356 - DNA, 20 bp, synthetic construct
  misc_feature 1..20: note = Synthetic construct
  source 1..20: mol_type = other DNA
atgcagacgataagtctatc

SEQ ID NO: 1357 - DNA, 20 bp, synthetic construct
  misc_feature 1..20: note = Synthetic construct
  source 1..20: mol_type = other DNA
tgcagacgataagtctatcg

SEQ ID NO: 1358 - DNA, 20 bp, synthetic construct
  misc_feature 1..20: note = Synthetic construct
  source 1..20: mol_type = other DNA
gcagacgataagtctatcgt

SEQ ID NO: 1359 - DNA, 20 bp, synthetic construct
  misc_feature 1..20: note = Synthetic construct
  source 1..20: mol_type = other DNA
cagacgataagtctatcgtc

SEQ ID NO: 1360 - DNA, 20 bp, synthetic construct
  misc_feature 1..20: note = Synthetic construct
  source 1..20: mol_type = other DNA
agacgataagtctatcgtcg

SEQ ID NO: 1361 - DNA, 20 bp, synthetic construct
  misc_feature 1..20: note = Synthetic construct
  source 1..20: mol_type = other DNA
gacgataagtctatcgtcgc

SEQ ID NO: 1362 - DNA, 20 bp, synthetic construct
  misc_feature 1..20: note = Synthetic construct
  source 1..20: mol_type = other DNA
acgataagtctatcgtcgca

SEQ ID NO: 1363 - DNA, 20 bp, synthetic construct
  misc_feature 1..20: note = Synthetic construct
  source 1..20: mol_type = other DNA
cgataagtctatcgtcgcaa

SEQ ID NO: 1364 - DNA, 20 bp, synthetic construct
  misc_feature 1..20: note = Synthetic construct
  source 1..20: mol_type = other DNA
gataagtctatcgtcgcaag

SEQ ID NO: 1365 - DNA, 20 bp, synthetic construct
  misc_feature 1..20: note = Synthetic construct
  source 1..20: mol_type = other DNA
ataagtctatcgtcgcaagc

SEQ ID NO: 1366 - DNA, 20 bp, synthetic construct
  misc_feature 1..20: note = Synthetic construct
  source 1..20: mol_type = other DNA
taagtctatcgtcgcaagcg

SEQ ID NO: 1367 - DNA, 20 bp, synthetic construct
  misc_feature 1..20: note = Synthetic construct
  source 1..20: mol_type = other DNA
aagtctatcgtcgcaagcga

SEQ ID NO: 1368 - DNA, 20 bp, synthetic construct
  misc_feature 1..20: note = Synthetic construct
  source 1..20: mol_type = other DNA
agtctatcgtcgcaagcgaa

SEQ ID NO: 1369 - DNA, 20 bp, synthetic construct
  misc_feature 1..20: note = Synthetic construct
  source 1..20: mol_type = other DNA
gtctatcgtcgcaagcgaac

SEQ ID NO: 1370 - DNA, 20 bp, synthetic construct
  misc_feature 1..20: note = Synthetic construct
  source 1..20: mol_type = other DNA
tctatcgtcgcaagcgaacc

SEQ ID NO: 1371 - DNA, 20 bp, synthetic construct
  misc_feature 1..20: note = Synthetic construct
  source 1..20: mol_type = other DNA
ctatcgtcgcaagcgaacca

SEQ ID NO: 1372 - DNA, 20 bp, synthetic construct
  misc_feature 1..20: note = Synthetic construct
  source 1..20: mol_type = other DNA
tatcgtcgcaagcgaaccat

SEQ ID NO: 1373 - DNA, 20 bp, synthetic construct
  misc_feature 1..20: note = Synthetic construct
  source 1..20: mol_type = other DNA
atcgtcgcaagcgaaccatc

SEQ ID NO: 1374 - DNA, 20 bp, synthetic construct
  misc_feature 1..20: note = Synthetic construct
  source 1..20: mol_type = other DNA
tcgtcgcaagcgaaccatct

SEQ ID NO: 1375 - DNA, 20 bp, synthetic construct
  misc_feature 1..20: note = Synthetic construct
  source 1..20: mol_type = other DNA
cgtcgcaagcgaaccatcta

SEQ ID NO: 1376 - DNA, 20 bp, synthetic construct
  misc_feature 1..20: note = Synthetic construct
  source 1..20: mol_type = other DNA
gtcgcaagcgaaccatctac

SEQ ID NO: 1377 - DNA, 20 bp, synthetic construct
  misc_feature 1..20: note = Synthetic construct
  source 1..20: mol_type = other DNA
tcgcaagcgaaccatctacg

SEQ ID NO: 1378 - DNA, 20 bp, synthetic construct
  misc_feature 1..20: note = Synthetic construct
  source 1..20: mol_type = other DNA
cgcaagcgaaccatctacgc

SEQ ID NO: 1379 - DNA, 20 bp, synthetic construct
  misc_feature 1..20: note = Synthetic construct
  source 1..20: mol_type = other DNA
gcaagcgaaccatctacgct

SEQ ID NO: 1380 - DNA, 20 bp, synthetic construct
  misc_feature 1..20: note = Synthetic construct
  source 1..20: mol_type = other DNA
caagcgaaccatctacgctg

SEQ ID NO: 1381 - DNA, 20 bp, synthetic construct
  misc_feature 1..20: note = Synthetic construct
  source 1..20: mol_type = other DNA
aagcgaaccatctacgctgc

SEQ ID NO: 1382 - DNA, 20 bp, synthetic construct
  misc_feature 1..20: note = Synthetic construct
  source 1..20: mol_type = other DNA
agcgaaccatctacgctgcc

SEQ ID NO: 1383 - DNA, 20 bp, synthetic construct
  misc_feature 1..20: note = Synthetic construct
  source 1..20: mol_type = other DNA
gcgaaccatctacgctgccc

SEQ ID NO: 1384 - DNA, 20 bp, synthetic construct
  misc_feature 1..20: note = Synthetic construct
  source 1..20: mol_type = other DNA
cgaaccatctacgctgccct

SEQ ID NO: 1385 - DNA, 20 bp, synthetic construct
  misc_feature 1..20: note = Synthetic construct
  source 1..20: mol_type = other DNA
gaaccatctacgctgccctg

SEQ ID NO: 1386 - DNA, 20 bp, synthetic construct
  misc_feature 1..20: note = Synthetic construct
  source 1..20: mol_type = other DNA
aaccatctacgctgccctgc

SEQ ID NO: 1387 - DNA, 20 bp, synthetic construct
  misc_feature 1..20: note = Synthetic construct
  source 1..20: mol_type = other DNA
accatctacgctgccctgct

SEQ ID NO: 1388 - DNA, 20 bp, synthetic construct
  misc_feature 1..20: note = Synthetic construct
  source 1..20: mol_type = other DNA
ccatctacgctgccctgctg

SEQ ID NO: 1389 - DNA, 20 bp, synthetic construct
  misc_feature 1..20: note = Synthetic construct
  source 1..20: mol_type = other DNA
catctacgctgccctgctga

SEQ ID NO: 1390 - DNA, 20 bp, synthetic construct
  misc_feature 1..20: note = Synthetic construct
  source 1..20: mol_type = other DNA
atctacgctgccctgctgag

SEQ ID NO: 1391 - DNA, 20 bp, synthetic construct
  misc_feature 1..20: note = Synthetic construct
  source 1..20: mol_type = other DNA
tctacgctgccctgctgagc

SEQ ID NO: 1392 - DNA, 20 bp, synthetic construct
  misc_feature 1..20: note = Synthetic construct
  source 1..20: mol_type = other DNA
ctacgctgccctgctgagcc

SEQ ID NO: 1393 - DNA, 20 bp, synthetic construct
  misc_feature 1..20: note = Synthetic construct
  source 1..20: mol_type = other DNA
tacgctgccctgctgagcca

SEQ ID NO: 1394 - DNA, 20 bp, synthetic construct
  misc_feature 1..20: note = Synthetic construct
  source 1..20: mol_type = other DNA
acgctgccctgctgagccag

SEQ ID NO: 1395 - DNA, 20 bp, synthetic construct
  misc_feature 1..20: note = Synthetic construct
  source 1..20: mol_type = other DNA
cgctgccctgctgagccaga

SEQ ID NO: 1396 - DNA, 20 bp, synthetic construct
  misc_feature 1..20: note = Synthetic construct
  source 1..20: mol_type = other DNA
gctgccctgctgagccagac

SEQ ID NO: 1397 - DNA, 20 bp, synthetic construct
  misc_feature 1..20: note = Synthetic construct
  source 1..20: mol_type = other DNA
ctgccctgctgagccagacg

SEQ ID NO: 1398 - DNA, 20 bp, synthetic construct
  misc_feature 1..20: note = Synthetic construct
  source 1..20: mol_type = other DNA
tgccctgctgagccagacgc

SEQ ID NO: 1399 - DNA, 20 bp, synthetic construct
  misc_feature 1..20: note = Synthetic construct
  source 1..20: mol_type = other DNA
gccctgctgagccagacgct

SEQ ID NO: 1400 - DNA, 20 bp, synthetic construct
  misc_feature 1..20: note = Synthetic construct
  source 1..20: mol_type = other DNA
ccctgctgagccagacgctg

SEQ ID NO: 1401 - DNA, 20 bp, synthetic construct
  misc_feature 1..20: note = Synthetic construct
  source 1..20: mol_type = other DNA
cctgctgagccagacgctgg

SEQ ID NO: 1402 - DNA, 20 bp, synthetic construct
  misc_feature 1..20: note = Synthetic construct
  source 1..20: mol_type = other DNA
ctgctgagccagacgctggt

SEQ ID NO: 1403 - DNA, 20 bp, synthetic construct
  misc_feature 1..20: note = Synthetic construct
  source 1..20: mol_type = other DNA
tgctgagccagacgctggtt

SEQ ID NO: 1404 - DNA, 20 bp, synthetic construct
  misc_feature 1..20: note = Synthetic construct
  source 1..20: mol_type = other DNA
gctgagccagacgctggttg

SEQ ID NO: 1405 - DNA, 20 bp, synthetic construct
  misc_feature 1..20: note = Synthetic construct
  source 1..20: mol_type = other DNA
ctgagccagacgctggttga

SEQ ID NO: 1406 - DNA, 20 bp, synthetic construct
  misc_feature 1..20: note = Synthetic construct
  source 1..20: mol_type = other DNA
tgagccagacgctggttgat

SEQ ID NO: 1407 - DNA, 20 bp, synthetic construct
  misc_feature 1..20: note = Synthetic construct
  source 1..20: mol_type = other DNA
gagccagacgctggttgatc

SEQ ID NO: 1408 - DNA, 20 bp, synthetic construct
  misc_feature 1..20: note = Synthetic construct
  source 1..20: mol_type = other DNA
agccagacgctggttgatcg

SEQ ID NO: 1409 - DNA, 20 bp, synthetic construct
  misc_feature 1..20: note = Synthetic construct
  source 1..20: mol_type = other DNA
gccagacgctggttgatcga

SEQ ID NO: 1410 - DNA, 20 bp, synthetic construct
  misc_feature 1..20: note = Synthetic construct
  source 1..20: mol_type = other DNA
ccagacgctggttgatcgat

SEQ ID NO: 1411 - DNA, 20 bp, synthetic construct
  misc_feature 1..20: note = Synthetic construct
  source 1..20: mol_type = other DNA
cagacgctggttgatcgatt

SEQ ID NO: 1412 - DNA, 20 bp, synthetic construct
  misc_feature 1..20: note = Synthetic construct
  source 1..20: mol_type = other DNA
agacgctggttgatcgattg

SEQ ID NO: 1413 - DNA, 20 bp, synthetic construct
  misc_feature 1..20: note = Synthetic construct
  source 1..20: mol_type = other DNA
gacgctggttgatcgattga

SEQ ID NO: 1414 - DNA, 20 bp, synthetic construct
  misc_feature 1..20: note = Synthetic construct
  source 1..20: mol_type = other DNA
acgctggttgatcgattgat

SEQ ID NO: 1415 - DNA, 20 bp, synthetic construct
  misc_feature 1..20: note = Synthetic construct
  source 1..20: mol_type = other DNA
cgctggttgatcgattgatc

SEQ ID NO: 1416 - DNA, 20 bp, synthetic construct
  misc_feature 1..20: note = Synthetic construct
  source 1..20: mol_type = other DNA
gctggttgatcgattgatca

SEQ ID NO: 1417 - DNA, 20 bp, synthetic construct
  misc_feature 1..20: note = Synthetic construct
  source 1..20: mol_type = other DNA
ctggttgatcgattgatcat

SEQ ID NO: 1418 - DNA, 20 bp, synthetic construct
  misc_feature 1..20: note = Synthetic construct
  source 1..20: mol_type = other DNA
tggttgatcgattgatcatt

SEQ ID NO: 1419 - DNA, 20 bp, synthetic construct
  misc_feature 1..20: note = Synthetic construct
  source 1..20: mol_type = other DNA
ggttgatcgattgatcattc

SEQ ID NO: 1420 - DNA, 20 bp, synthetic construct
  misc_feature 1..20: note = Synthetic construct
  source 1..20: mol_type = other DNA
gttgatcgattgatcattca

SEQ ID NO: 1421 - DNA, 20 bp, synthetic construct
  misc_feature 1..20: note = Synthetic construct
  source 1..20: mol_type = other DNA
ttgatcgattgatcattcag

SEQ ID NO: 1422 - DNA, 20 bp, synthetic construct
  misc_feature 1..20: note = Synthetic construct
  source 1..20: mol_type = other DNA
tgatcgattgatcattcagg

SEQ ID NO: 1423 - DNA, 20 bp, synthetic construct
  misc_feature 1..20: note = Synthetic construct
  source 1..20: mol_type = other DNA
gatcgattgatcattcaggt

SEQ ID NO: 1424 - DNA, 20 bp, synthetic construct
  misc_feature 1..20: note = Synthetic construct
  source 1..20: mol_type = other DNA
atcgattgatcattcaggtc

SEQ ID NO: 1425 - DNA, 20 bp, synthetic construct
  misc_feature 1..20: note = Synthetic construct
  source 1..20: mol_type = other DNA
tcgattgatcattcaggtct

SEQ ID NO: 1426 - DNA, 20 bp, synthetic construct
  misc_feature 1..20: note = Synthetic construct
  source 1..20: mol_type = other DNA
cgattgatcattcaggtcta

SEQ ID NO: 1427 - DNA, 20 bp, synthetic construct
  misc_feature 1..20: note = Synthetic construct
  source 1..20: mol_type = other DNA
gattgatcattcaggtctat

SEQ ID NO: 1428 - DNA, 20 bp, synthetic construct
  misc_feature 1..20: note = Synthetic construct
  source 1..20: mol_type = other DNA
attgatcattcaggtctata

SEQ ID NO: 1429 - DNA, 20 bp, synthetic construct
  misc_feature 1..20: note = Synthetic construct
  source 1..20: mol_type = other DNA
ttgatcattcaggtctatac

SEQ ID NO: 1430 - DNA, 20 bp, synthetic construct
  misc_feature 1..20: note = Synthetic construct
  source 1..20: mol_type = other DNA
tgatcattcaggtctatacc

SEQ ID NO: 1431 - DNA, 20 bp, synthetic construct
  misc_feature 1..20: note = Synthetic construct
  source 1..20: mol_type = other DNA
gatcattcaggtctatacca

SEQ ID NO: 1432 - DNA, 20 bp, synthetic construct
  misc_feature 1..20: note = Synthetic construct
  source 1..20: mol_type = other DNA
atcattcaggtctataccaa

SEQ ID NO: 1433 - DNA, 20 bp, synthetic construct
  misc_feature 1..20: note = Synthetic construct
  source 1..20: mol_type = other DNA
tcattcaggtctataccaac

SEQ ID NO: 1434 - DNA, 20 bp, synthetic construct
  misc_feature 1..20: note = Synthetic construct
  source 1..20: mol_type = other DNA
cattcaggtctataccaacg

SEQ ID NO: 1435 - DNA, 20 bp, synthetic construct
  misc_feature 1..20: note = Synthetic construct
  source 1..20: mol_type = other DNA
attcaggtctataccaacgg

SEQ ID NO: 1436 - DNA, 20 bp, synthetic construct
  misc_feature 1..20: note = Synthetic construct
  source 1..20: mol_type = other DNA
ttcaggtctataccaacgga

SEQ ID NO: 1437 - DNA, 20 bp, synthetic construct
  misc_feature 1..20: note = Synthetic construct
  source 1..20: mol_type = other DNA
tcaggtctataccaacggat

SEQ ID NO: 1438 - DNA, 20 bp, synthetic construct
  misc_feature 1..20: note = Synthetic construct
  source 1..20: mol_type = other DNA
caggtctataccaacggatt

SEQ ID NO: 1439 - DNA, 20 bp, synthetic construct
  misc_feature 1..20: note = Synthetic construct
  source 1..20: mol_type = other DNA
aggtctataccaacggattt

SEQ ID NO: 1440 - DNA, 20 bp, synthetic construct
  misc_feature 1..20: note = Synthetic construct
  source 1..20: mol_type = other DNA
ggtctataccaacggatttg

SEQ ID NO: 1441 - DNA, 20 bp, synthetic construct
  misc_feature 1..20: note = Synthetic construct
  source 1..20: mol_type = other DNA
gtctataccaacggatttga

SEQ ID NO: 1442 - DNA, 20 bp, synthetic construct
  misc_feature 1..20: note = Synthetic construct
  source 1..20: mol_type = other DNA
tctataccaacggatttgag

SEQ ID NO: 1443 - DNA, 20 bp, synthetic construct
  misc_feature 1..20: note = Synthetic construct
  source 1..20: mol_type = other DNA
ctataccaacggatttgagc

SEQ ID NO: 1444 - DNA, 20 bp, synthetic construct
  misc_feature 1..20: note = Synthetic construct
  source 1..20: mol_type = other DNA
tataccaacggatttgagcc

SEQ ID NO: 1445 - DNA, 20 bp, synthetic construct
  misc_feature 1..20: note = Synthetic construct
  source 1..20: mol_type = other DNA
ataccaacggatttgagccg

SEQ ID NO: 1446 - DNA, 20 bp, synthetic construct
  misc_feature 1..20: note = Synthetic construct
  source 1..20: mol_type = other DNA
taccaacggatttgagccgg

SEQ ID NO: 1447 - DNA, 20 bp, synthetic construct
  misc_feature 1..20: note = Synthetic construct
  source 1..20: mol_type = other DNA
accaacggatttgagccggc

SEQ ID NO: 1448 - DNA, 20 bp, synthetic construct
  misc_feature 1..20: note = Synthetic construct
  source 1..20: mol_type = other DNA
ccaacggatttgagccggcg

SEQ ID NO: 1449 - DNA, 20 bp, synthetic construct
  misc_feature 1..20: note = Synthetic construct
  source 1..20: mol_type = other DNA
caacggatttgagccggcgt

SEQ ID NO: 1450 - DNA, 20 bp, synthetic construct
  misc_feature 1..20: note = Synthetic construct
  source 1..20: mol_type = other DNA
aacggatttgagccggcgtc

SEQ ID NO: 1451 - DNA, 20 bp, synthetic construct
  misc_feature 1..20: note = Synthetic construct
  source 1..20: mol_type = other DNA
acggatttgagccggcgtct

SEQ ID NO: 1452 - DNA, 20 bp, synthetic construct
  misc_feature 1..20: note = Synthetic construct
  source 1..20: mol_type = other DNA
cggatttgagccggcgtctg

SEQ ID NO: 1453 - DNA, 20 bp, synthetic construct
  misc_feature 1..20: note = Synthetic construct
  source 1..20: mol_type = other DNA
ggatttgagccggcgtctga

SEQ ID NO: 1454 - DNA, 20 bp, synthetic construct
  misc_feature 1..20: note = Synthetic construct
  source 1..20: mol_type = other DNA
gatttgagccggcgtctgat

SEQ ID NO: 1455 - DNA, 20 bp, synthetic construct
  misc_feature 1..20: note = Synthetic construct
  source 1..20: mol_type = other DNA
atttgagccggcgtctgatg

SEQ ID NO: 1456 - DNA, 20 bp, synthetic construct
  misc_feature 1..20: note = Synthetic construct
  source 1..20: mol_type = other DNA
tttgagccggcgtctgatga

SEQ ID NO: 1457 - DNA, 20 bp, synthetic construct
  misc_feature 1..20: note = Synthetic construct
  source 1..20: mol_type = other DNA
ttgagccggcgtctgatgaa

SEQ ID NO: 1458 - DNA, 20 bp, synthetic construct
  misc_feature 1..20: note = Synthetic construct
  source 1..20: mol_type = other DNA
tgagccggcgtctgatgaaa

SEQ ID NO: 1459 - DNA, 20 bp, synthetic construct
  misc_feature 1..20: note = Synthetic construct
  source 1..20: mol_type = other DNA
gagccggcgtctgatgaaag

SEQ ID NO: 1460 - DNA, 20 bp, synthetic construct
  misc_feature 1..20: note = Synthetic construct
  source 1..20: mol_type = other DNA
agccggcgtctgatgaaagc

SEQ ID NO: 1461 - DNA, 20 bp, synthetic construct
  misc_feature 1..20: note = Synthetic construct
  source 1..20: mol_type = other DNA
gccggcgtctgatgaaagca

SEQ ID NO: 1462 - DNA, 20 bp, synthetic construct
  misc_feature 1..20: note = Synthetic construct
  source 1..20: mol_type = other DNA
ccggcgtctgatgaaagcac

SEQ ID NO: 1463 - DNA, 20 bp, synthetic construct
  misc_feature 1..20: note = Synthetic construct
  source 1..20: mol_type = other DNA
cggcgtctgatgaaagcacc

SEQ ID NO: 1464 - DNA, 20 bp, synthetic construct
  misc_feature 1..20: note = Synthetic construct
  source 1..20: mol_type = other DNA
ggcgtctgatgaaagcaccg

SEQ ID NO: 1465 - DNA, 20 bp, synthetic construct
  misc_feature 1..20: note = Synthetic construct
  source 1..20: mol_type = other DNA
gcgtctgatgaaagcaccga

SEQ ID NO: 1466 - DNA, 20 bp, synthetic construct
  misc_feature 1..20: note = Synthetic construct
  source 1..20: mol_type = other DNA
cgtctgatgaaagcaccgac

SEQ ID NO: 1467 - DNA, 20 bp, synthetic construct
  misc_feature 1..20: note = Synthetic construct
  source 1..20: mol_type = other DNA
gtctgatgaaagcaccgacc

SEQ ID NO: 1468 - DNA, 20 bp, synthetic construct
  misc_feature 1..20: note = Synthetic construct
  source 1..20: mol_type = other DNA
tctgatgaaagcaccgaccc

SEQ ID NO: 1469 - DNA, 20 bp, synthetic construct
  misc_feature 1..20: note = Synthetic construct
  source 1..20: mol_type = other DNA
ctgatgaaagcaccgacccc

SEQ ID NO: 1470 - DNA, 20 bp, synthetic construct
  misc_feature 1..20: note = Synthetic construct
  source 1..20: mol_type = other DNA
tgatgaaagcaccgacccct

SEQ ID NO: 1471 - DNA, 20 bp, synthetic construct
  misc_feature 1..20: note = Synthetic construct
  source 1..20: mol_type = other DNA
gatgaaagcaccgacccctt

SEQ ID NO: 1472 - DNA, 20 bp, synthetic construct
  misc_feature 1..20: note = Synthetic construct
  source 1..20: mol_type = other DNA
atgaaagcaccgaccccttt

SEQ ID NO: 1473 - DNA, 20 bp, synthetic construct
  misc_feature 1..20: note = Synthetic construct
  source 1..20: mol_type = other DNA
tgaaagcaccgacccctttc

SEQ ID NO: 1474 - DNA, 20 bp, synthetic construct
  misc_feature 1..20: note = Synthetic construct
  source 1..20: mol_type = other DNA
gaaagcaccgacccctttct

SEQ ID NO: 1475 - DNA, 20 bp, synthetic construct
  misc_feature 1..20: note = Synthetic construct
  source 1..20: mol_type = other DNA
aaagcaccgacccctttctg

SEQ ID NO: 1476 - DNA, 20 bp, synthetic construct
  misc_feature 1..20: note = Synthetic construct
  source 1..20: mol_type = other DNA
aagcaccgacccctttctgg

SEQ ID NO: 1477 - DNA, 20 bp, synthetic construct
  misc_feature 1..20: note = Synthetic construct
  source 1..20: mol_type = other DNA
agcaccgacccctttctgga

SEQ ID NO: 1478 - DNA, 20 bp, synthetic construct
  misc_feature 1..20: note = Synthetic construct
  source 1..20: mol_type = other DNA
gcaccgacccctttctggag

SEQ ID NO: 1479 - DNA, 20 bp, synthetic construct
  misc_feature 1..20: note = Synthetic construct
  source 1..20: mol_type = other DNA
caccgacccctttctggagg

SEQ ID NO: 1480 - DNA, 20 bp, synthetic construct
  misc_feature 1..20: note = Synthetic construct
  source 1..20: mol_type = other DNA
accgacccctttctggaggt

SEQ ID NO: 1481 - DNA, 20 bp, synthetic construct
  misc_feature 1..20: note = Synthetic construct
  source 1..20: mol_type = other DNA
ccgacccctttctggaggta

SEQ ID NO: 1482 - DNA, 20 bp, synthetic construct
  misc_feature 1..20: note = Synthetic construct
  source 1..20: mol_type = other DNA
cgacccctttctggaggtac

SEQ ID NO: 1483 - DNA, 20 bp, synthetic construct
  misc_feature 1..20: note = Synthetic construct
  source 1..20: mol_type = other DNA
gacccctttctggaggtaca

SEQ ID NO: 1484 - DNA, 20 bp, synthetic construct
  misc_feature 1..20: note = Synthetic construct
  source 1..20: mol_type = other DNA
acccctttctggaggtacat

SEQ ID NO: 1485 - DNA, 20 bp, synthetic construct
  misc_feature 1..20: note = Synthetic construct
  source 1..20: mol_type = other DNA
cccctttctggaggtacata

SEQ ID NO: 1486 - DNA, 20 bp, synthetic construct
  misc_feature 1..20: note = Synthetic construct
  source 1..20: mol_type = other DNA
ccctttctggaggtacatat

SEQ ID NO: 1487 - DNA, 20 bp, synthetic construct
  misc_feature 1..20: note = Synthetic construct
  source 1..20: mol_type = other DNA
cctttctggaggtacatatt

SEQ ID NO: 1488 - DNA, 20 bp, synthetic construct
  misc_feature 1..20: note = Synthetic construct
  source 1..20: mol_type = other DNA
ctttctggaggtacatattc

SEQ ID NO: 1489 - DNA, 20 bp, synthetic construct
  misc_feature 1..20: note = Synthetic construct
  source 1..20: mol_type = other DNA
tttctggaggtacatattca

SEQ ID NO: 1490 - DNA, 20 bp, synthetic construct
  misc_feature 1..20: note = Synthetic construct
  source 1..20: mol_type = other DNA
ttctggaggtacatattcat

SEQ ID NO: 1491 - DNA, 20 bp, synthetic construct
  misc_feature 1..20: note = Synthetic construct
  source 1..20: mol_type = other DNA
tctggaggtacatattcata

SEQ ID NO: 1492 - DNA, 20 bp, synthetic construct
  misc_feature 1..20: note = Synthetic construct
  source 1..20: mol_type = other DNA
ctggaggtacatattcatat

SEQ ID NO: 1493 - DNA, 20 bp, synthetic construct
  misc_feature 1..20: note = Synthetic construct
  source 1..20: mol_type = other DNA
tggaggtacatattcatatc

SEQ ID NO: 1494 - DNA, 20 bp, synthetic construct
  misc_feature 1..20: note = Synthetic construct
  source 1..20: mol_type = other DNA
ggaggtacatattcatatca

SEQ ID NO: 1495 - DNA, 20 bp, synthetic construct
  misc_feature 1..20: note = Synthetic construct
  source 1..20: mol_type = other DNA
gaggtacatattcatatcag

SEQ ID NO: 1496 - DNA, 20 bp, synthetic construct
  misc_feature 1..20: note = Synthetic construct
  source 1..20: mol_type = other DNA
aggtacatattcatatcagg

SEQ ID NO: 1497 - DNA, 20 bp, synthetic construct
  misc_feature 1..20: note = Synthetic construct
  source 1..20: mol_type = other DNA
ggtacatattcatatcaggc

SEQ ID NO: 1498 - DNA, 20 bp, synthetic construct
  misc_feature 1..20: note = Synthetic construct
  source 1..20: mol_type = other DNA
gtacatattcatatcaggct

SEQ ID NO: 1499 - DNA, 20 bp, synthetic construct
  misc_feature 1..20: note = Synthetic construct
  source 1..20: mol_type = other DNA
tacatattcatatcaggctc

SEQ ID NO: 1500 - DNA, 20 bp, synthetic construct
  misc_feature 1..20: note = Synthetic construct
  source 1..20: mol_type = other DNA
acatattcatatcaggctcc

SEQ ID NO: 1501 - DNA, 20 bp, synthetic construct
  misc_feature 1..20: note = Synthetic construct
  source 1..20: mol_type = other DNA
catattcatatcaggctcct

SEQ ID NO: 1502 - DNA, 20 bp, synthetic construct
  misc_feature 1..20: note = Synthetic construct
  source 1..20: mol_type = other DNA
atattcatatcaggctcctt

SEQ ID NO: 1503 - DNA, 20 bp, synthetic construct
  misc_feature 1..20: note = Synthetic construct
  source 1..20: mol_type = other DNA
tattcatatcaggctcctta

SEQ ID NO: 1504 - DNA, 20 bp, synthetic construct
  misc_feature 1..20: note = Synthetic construct
  source 1..20: mol_type = other DNA
attcatatcaggctccttac

SEQ ID NO: 1505 - DNA, 20 bp, synthetic construct
  misc_feature 1..20: note = Synthetic construct
  source 1..20: mol_type = other DNA
ttcatatcaggctccttaca

SEQ ID NO: 1506 - DNA, 20 bp, synthetic construct
  misc_feature 1..20: note = Synthetic construct
  source 1..20: mol_type = other DNA
tcatatcaggctccttacag

SEQ ID NO: 1507 - DNA, 20 bp, synthetic construct
  misc_feature 1..20: note = Synthetic construct
  source 1..20: mol_type = other DNA
catatcaggctccttacagg

SEQ ID NO: 1508 - DNA, 20 bp, synthetic construct
  misc_feature 1..20: note = Synthetic construct
  source 1..20: mol_type = other DNA
atatcaggctccttacaggc

SEQ ID NO: 1509 - DNA, 20 bp, synthetic construct
  misc_feature 1..20: note = Synthetic construct
  source 1..20: mol_type = other DNA
tatcaggctccttacaggca

SEQ ID NO: 1510 - DNA, 20 bp, synthetic construct
  misc_feature 1..20: note = Synthetic construct
  source 1..20: mol_type = other DNA
atcaggctccttacaggcag

SEQ ID NO: 1511 - DNA, 20 bp, synthetic construct
  misc_feature 1..20: note = Synthetic construct
  source 1..20: mol_type = other DNA
tcaggctccttacaggcagc

SEQ ID NO: 1512 - DNA, 20 bp, synthetic construct
  misc_feature 1..20: note = Synthetic construct
  source 1..20: mol_type = other DNA
caggctccttacaggcagcc

SEQ ID NO: 1513 - DNA, 20 bp, synthetic construct
  misc_feature 1..20: note = Synthetic construct
  source 1..20: mol_type = other DNA
aggctccttacaggcagccc

SEQ ID NO: 1514 - DNA, 20 bp, synthetic construct
  misc_feature 1..20: note = Synthetic construct
  source 1..20: mol_type = other DNA
ggctccttacaggcagcccg

SEQ ID NO: 1515 - DNA, 20 bp, synthetic construct
  misc_feature 1..20: note = Synthetic construct
  source 1..20: mol_type = other DNA
gctccttacaggcagcccga

SEQ ID NO: 1516 - DNA, 20 bp, synthetic construct
  misc_feature 1..20: note = Synthetic construct
  source 1..20: mol_type = other DNA
ctccttacaggcagcccgat

SEQ ID NO: 1517 - DNA, 20 bp, synthetic construct
  misc_feature 1..20: note = Synthetic construct
  source 1..20: mol_type = other DNA
tccttacaggcagcccgatc

SEQ ID NO: 1518 - DNA, 20 bp, synthetic construct
  misc_feature 1..20: note = Synthetic construct
  source 1..20: mol_type = other DNA
ccttacaggcagcccgatct

SEQ ID NO: 1519 - DNA, 20 bp, synthetic construct
  misc_feature 1..20: note = Synthetic construct
  source 1..20: mol_type = other DNA
cttacaggcagcccgatcta

SEQ ID NO: 1520 - DNA, 20 bp, synthetic construct
  misc_feature 1..20: note = Synthetic construct
  source 1..20: mol_type = other DNA
ttacaggcagcccgatctat

SEQ ID NO: 1521 - DNA, 20 bp, synthetic construct
  misc_feature 1..20: note = Synthetic construct
  source 1..20: mol_type = other DNA
tacaggcagcccgatctatt

SEQ ID NO: 1522 - DNA, 20 bp, synthetic construct
  misc_feature 1..20: note = Synthetic construct
  source 1..20: mol_type = other DNA
acaggcagcccgatctattt

SEQ ID NO: 1523 - DNA, 20 bp, synthetic construct
  misc_feature 1..20: note = Synthetic construct
  source 1..20: mol_type = other DNA
caggcagcccgatctatttt

SEQ ID NO: 1524 - DNA, 20 bp, synthetic construct
  misc_feature 1..20: note = Synthetic construct
  source 1..20: mol_type = other DNA
aggcagcccgatctatttta

SEQ ID NO: 1525 - DNA, 20 bp, synthetic construct
  misc_feature 1..20: note = Synthetic construct
  source 1..20: mol_type = other DNA
ggcagcccgatctattttat

SEQ ID NO: 1526 - DNA, 20 bp, synthetic construct
  misc_feature 1..20: note = Synthetic construct
  source 1..20: mol_type = other DNA
gcagcccgatctattttatt

SEQ ID NO: 1527 - DNA, 20 bp, synthetic construct
  misc_feature 1..20: note = Synthetic construct
  source 1..20: mol_type = other DNA
cagcccgatctattttatta

SEQ ID NO: 1528 - DNA, 20 bp, synthetic construct
  misc_feature 1..20: note = Synthetic construct
  source 1..20: mol_type = other DNA
agcccgatctattttattat

SEQ ID NO: 1529 - DNA, 20 bp, synthetic construct
  misc_feature 1..20: note = Synthetic construct
  source 1..20: mol_type = other DNA
gcccgatctattttattatt

SEQ ID NO: 1530 - DNA, 20 bp, synthetic construct
  misc_feature 1..20: note = Synthetic construct
  source 1..20: mol_type = other DNA
cccgatctattttattattc

SEQ ID NO: 1531 - DNA, 20 bp, synthetic construct
  misc_feature 1..20: note = Synthetic construct
  source 1..20: mol_type = other DNA
ccgatctattttattattct

SEQ ID NO: 1532 - DNA, 20 bp, synthetic construct
  misc_feature 1..20: note = Synthetic construct
  source 1..20: mol_type = other DNA
cgatctattttattattctt

SEQ ID NO: 1533 - DNA, 20 bp, synthetic construct
  misc_feature 1..20: note = Synthetic construct
  source 1..20: mol_type = other DNA
gatctattttattattcttc

SEQ ID NO: 1534 - DNA, 20 bp, synthetic construct
  misc_feature 1..20: note = Synthetic construct
  source 1..20: mol_type = other DNA
atctattttattattcttcg

SEQ ID NO: 1535 - DNA, 20 bp, synthetic construct
  misc_feature 1..20: note = Synthetic construct
  source 1..20: mol_type = other DNA
tctattttattattcttcgg

SEQ ID NO: 1536 - DNA, 20 bp, synthetic construct
  misc_feature 1..20: note = Synthetic construct
  source 1..20: mol_type = other DNA
ctattttattattcttcgga

SEQ ID NO: 1537 - DNA, 20 bp, synthetic construct
  misc_feature 1..20: note = Synthetic construct
  source 1..20: mol_type = other DNA
tattttattattcttcggaa

SEQ ID NO: 1538 - DNA, 20 bp, synthetic construct
  misc_feature 1..20: note = Synthetic construct
  source 1..20: mol_type = other DNA
attttattattcttcggaac

SEQ ID NO: 1539 - DNA, 20 bp, synthetic construct
  misc_feature 1..20: note = Synthetic construct
  source 1..20: mol_type = other DNA
ttttattattcttcggaact

SEQ ID NO: 1540 - DNA, 20 bp, synthetic construct
  misc_feature 1..20: note = Synthetic construct
  source 1..20: mol_type = other DNA
tttattattcttcggaactg

SEQ ID NO: 1541 - DNA, 20 bp, synthetic construct
  misc_feature 1..20: note = Synthetic construct
  source 1..20: mol_type = other DNA
ttattattcttcggaactgt

SEQ ID NO: 1542 - DNA, 20 bp, synthetic construct
  misc_feature 1..20: note = Synthetic construct
  source 1..20: mol_type = other DNA
tattattcttcggaactgta

SEQ ID NO: 1543 - DNA, 20 bp, synthetic construct
  misc_feature 1..20: note = Synthetic construct
  source 1..20: mol_type = other DNA
attattcttcggaactgtaa

SEQ ID NO: 1544 - DNA, 20 bp, synthetic construct
  misc_feature 1..20: note = Synthetic construct
  source 1..20: mol_type = other DNA
ttattcttcggaactgtaaa

SEQ ID NO: 1545 - DNA, 20 bp, synthetic construct
  misc_feature 1..20: note = Synthetic construct
  source 1..20: mol_type = other DNA
tattcttcggaactgtaaac

SEQ ID NO: 1546 - DNA, 20 bp, synthetic construct
  misc_feature 1..20: note = Synthetic construct
  source 1..20: mol_type = other DNA
attcttcggaactgtaaaca

SEQ ID NO: 1547 - DNA, 20 bp, synthetic construct
  misc_feature 1..20: note = Synthetic construct
  source 1..20: mol_type = other DNA
ttcttcggaactgtaaacac

SEQ ID NO: 1548 - DNA, 20 bp, synthetic construct
  misc_feature 1..20: note = Synthetic construct
  source 1..20: mol_type = other DNA
tcttcggaactgtaaacact

SEQ ID NO: 1549 - DNA, 20 bp, synthetic construct
  misc_feature 1..20: note = Synthetic construct
  source 1..20: mol_type = other DNA
cttcggaactgtaaacactc

SEQ ID NO: 1550 - DNA, 20 bp, synthetic construct
  misc_feature 1..20: note = Synthetic construct
  source 1..20: mol_type = other DNA
ttcggaactgtaaacactcc

SEQ ID NO: 1551 - DNA, 20 bp, synthetic construct
  misc_feature 1..20: note = Synthetic construct
  source 1..20: mol_type = other DNA
tcggaactgtaaacactccg

SEQ ID NO: 1552 - DNA, 20 bp, synthetic construct
  misc_feature 1..20: note = Synthetic construct
  source 1..20: mol_type = other DNA
cggaactgtaaacactccgt

SEQ ID NO: 1553 - DNA, 20 bp, synthetic construct
  misc_feature 1..20: note = Synthetic construct
  source 1..20: mol_type = other DNA
ggaactgtaaacactccgtt

SEQ ID NO: 1554 - DNA, 20 bp, synthetic construct
  misc_feature 1..20: note = Synthetic construct
  source 1..20: mol_type = other DNA
gaactgtaaacactccgttc

SEQ ID NO: 1555 - DNA, 20 bp, synthetic construct
  misc_feature 1..20: note = Synthetic construct
  source 1..20: mol_type = other DNA
aactgtaaacactccgttcc

SEQ ID NO: 1556 - DNA, 20 bp, synthetic construct
  misc_feature 1..20: note = Synthetic construct
  source 1..20: mol_type = other DNA
actgtaaacactccgttccc

SEQ ID NO: 1557 - DNA, 20 bp, synthetic construct
  misc_feature 1..20: note = Synthetic construct
  source 1..20: mol_type = other DNA
ctgtaaacactccgttccct

SEQ ID NO: 1558 - DNA, 20 bp, synthetic construct
  misc_feature 1..20: note = Synthetic construct
  source 1..20: mol_type = other DNA
tgtaaacactccgttcccta

SEQ ID NO: 1559 - DNA, 20 bp, synthetic construct
  misc_feature 1..20: note = Synthetic construct
  source 1..20: mol_type = other DNA
gtaaacactccgttccctac

SEQ ID NO: 1560 - DNA, 20 bp, synthetic construct
  misc_feature 1..20: note = Synthetic construct
  source 1..20: mol_type = other DNA
taaacactccgttccctaca

SEQ ID NO: 1561 - DNA, 20 bp, synthetic construct
  misc_feature 1..20: note = Synthetic construct
  source 1..20: mol_type = other DNA
aaacactccgttccctacaa

SEQ ID NO: 1562 - DNA, 20 bp, synthetic construct
  misc_feature 1..20: note = Synthetic construct
  source 1..20: mol_type = other DNA
aacactccgttccctacaac

SEQ ID NO: 1563 - DNA, 20 bp, synthetic construct
  misc_feature 1..20: note = Synthetic construct
  source 1..20: mol_type = other DNA
acactccgttccctacaacg

SEQ ID NO: 1564 - DNA, 20 bp, synthetic construct
  misc_feature 1..20: note = Synthetic construct
  source 1..20: mol_type = other DNA
cactccgttccctacaacga

SEQ ID NO: 1565 - DNA, 20 bp, synthetic construct
  misc_feature 1..20: note = Synthetic construct
  source 1..20: mol_type = other DNA
actccgttccctacaacgag

SEQ ID NO: 1566 - DNA, 20 bp, synthetic construct
  misc_feature 1..20: note = Synthetic construct
  source 1..20: mol_type = other DNA
ctccgttccctacaacgagc

SEQ ID NO: 1567 - DNA, 20 bp, synthetic construct
  misc_feature 1..20: note = Synthetic construct
  source 1..20: mol_type = other DNA
tccgttccctacaacgagcc

SEQ ID NO: 1568 - DNA, 20 bp, synthetic construct
  misc_feature 1..20: note = Synthetic construct
  source 1..20: mol_type = other DNA
ccgttccctacaacgagcct

SEQ ID NO: 1569 - DNA, 20 bp, synthetic construct
  misc_feature 1..20: note = Synthetic construct
  source 1..20: mol_type = other DNA
cgttccctacaacgagccta

SEQ ID NO: 1570 - DNA, 20 bp, synthetic construct
  misc_feature 1..20: note = Synthetic construct
  source 1..20: mol_type = other DNA
gttccctacaacgagcctaa

SEQ ID NO: 1571 - DNA, 20 bp, synthetic construct
  misc_feature 1..20: note = Synthetic construct
  source 1..20: mol_type = other DNA
ttccctacaacgagcctaaa

SEQ ID NO: 1572 - DNA, 20 bp, synthetic construct
  misc_feature 1..20: note = Synthetic construct
  source 1..20: mol_type = other DNA
tccctacaacgagcctaaat

SEQ ID NO: 1573 - DNA, 20 bp, synthetic construct
  misc_feature 1..20: note = Synthetic construct
  source 1..20: mol_type = other DNA
ccctacaacgagcctaaatt

SEQ ID NO: 1574 - DNA, 20 bp, synthetic construct
  misc_feature 1..20: note = Synthetic construct
  source 1..20: mol_type = other DNA
cctacaacgagcctaaattc

SEQ ID NO: 1575 - DNA, 20 bp, synthetic construct
  misc_feature 1..20: note = Synthetic construct
  source 1..20: mol_type = other DNA
ctacaacgagcctaaattca

SEQ ID NO: 1576 - DNA, 20 bp, synthetic construct
  misc_feature 1..20: note = Synthetic construct
  source 1..20: mol_type = other DNA
tacaacgagcctaaattcat

SEQ ID NO: 1577 - DNA, 20 bp, synthetic construct
  misc_feature 1..20: note = Synthetic construct
  source 1..20: mol_type = other DNA
acaacgagcctaaattcata

SEQ ID NO: 1578 - DNA, 20 bp, synthetic construct
  misc_feature 1..20: note = Synthetic construct
  source 1..20: mol_type = other DNA
caacgagcctaaattcatat

SEQ ID NO: 1579 - DNA, 20 bp, synthetic construct
  misc_feature 1..20: note = Synthetic construct
  source 1..20: mol_type = other DNA
aacgagcctaaattcatatg

SEQ ID NO: 1580 - DNA, 20 bp, synthetic construct
  misc_feature 1..20: note = Synthetic construct
  source 1..20: mol_type = other DNA
acgagcctaaattcatatga

SEQ ID NO: 1581 - DNA, 20 bp, synthetic construct
  misc_feature 1..20: note = Synthetic construct
  source 1..20: mol_type = other DNA
cgagcctaaattcatatgac

SEQ ID NO: 1582 - DNA, 20 bp, synthetic construct
  misc_feature 1..20: note = Synthetic construct
  source 1..20: mol_type = other DNA
gagcctaaattcatatgact

SEQ ID NO: 1583 - DNA, 20 bp, synthetic construct
  misc_feature 1..20: note = Synthetic construct
  source 1..20: mol_type = other DNA
agcctaaattcatatgactc

SEQ ID NO: 1584 - DNA, 20 bp, synthetic construct
  misc_feature 1..20: note = Synthetic construct
  source 1..20: mol_type = other DNA
gcctaaattcatatgactcg

SEQ ID NO: 1585 - DNA, 20 bp, synthetic construct
  misc_feature 1..20: note = Synthetic construct
  source 1..20: mol_type = other DNA
cctaaattcatatgactcgt

SEQ ID NO: 1586 - DNA, 20 bp, synthetic construct
  misc_feature 1..20: note = Synthetic construct
  source 1..20: mol_type = other DNA
ctaaattcatatgactcgtt

SEQ ID NO: 1587 - DNA, 20 bp, synthetic construct
  misc_feature 1..20: note = Synthetic construct
  source 1..20: mol_type = other DNA
taaattcatatgactcgtta

SEQ ID NO: 1588 - DNA, 20 bp, synthetic construct
  misc_feature 1..20: note = Synthetic construct
  source 1..20: mol_type = other DNA
aaattcatatgactcgttat

SEQ ID NO: 1589 - DNA, 20 bp, synthetic construct
  misc_feature 1..20: note = Synthetic construct
  source 1..20: mol_type = other DNA
aattcatatgactcgttata

SEQ ID NO: 1590 - DNA, 20 bp, synthetic construct
  misc_feature 1..20: note = Synthetic construct
  source 1..20: mol_type = other DNA
attcatatgactcgttatag

SEQ ID NO: 1591 - DNA, 20 bp, synthetic construct
  misc_feature 1..20: note = Synthetic construct
  source 1..20: mol_type = other DNA
ttcatatgactcgttatagc

SEQ ID NO: 1592 - DNA, 20 bp, synthetic construct
  misc_feature 1..20: note = Synthetic construct
  source 1..20: mol_type = other DNA
tcatatgactcgttatagcg

SEQ ID NO: 1593 - DNA, 20 bp, synthetic construct
  misc_feature 1..20: note = Synthetic construct
  source 1..20: mol_type = other DNA
catatgactcgttatagcgg

SEQ ID NO: 1594 - DNA, 20 bp, synthetic construct
  misc_feature 1..20: note = Synthetic construct
  source 1..20: mol_type = other DNA
atatgactcgttatagcgga

SEQ ID NO: 1595 - DNA, 20 bp, synthetic construct
  misc_feature 1..20: note = Synthetic construct
  source 1..20: mol_type = other DNA
tatgactcgttatagcggac

SEQ ID NO: 1596 - DNA, 20 bp, synthetic construct
  misc_feature 1..20: note = Synthetic construct
  source 1..20: mol_type = other DNA
atgactcgttatagcggacc

SEQ ID NO: 1597 - DNA, 20 bp, synthetic construct
  misc_feature 1..20: note = Synthetic construct
  source 1..20: mol_type = other DNA
tgactcgttatagcggaccg

SEQ ID NO: 1598 - DNA, 20 bp, synthetic construct
  misc_feature 1..20: note = Synthetic construct
  source 1..20: mol_type = other DNA
gactcgttatagcggaccgc

SEQ ID NO: 1599 - DNA, 20 bp, synthetic construct
  misc_feature 1..20: note = Synthetic construct
  source 1..20: mol_type = other DNA
actcgttatagcggaccgcg

SEQ ID NO: 1600 - DNA, 20 bp, synthetic construct
  misc_feature 1..20: note = Synthetic construct
  source 1..20: mol_type = other DNA
ctcgttatagcggaccgcgt

SEQ ID NO: 1601 - DNA, 20 bp, synthetic construct
  misc_feature 1..20: note = Synthetic construct
  source 1..20: mol_type = other DNA
tcgttatagcggaccgcgtg

SEQ ID NO: 1602 - DNA, 20 bp, synthetic construct
  misc_feature 1..20: note = Synthetic construct
  source 1..20: mol_type = other DNA
cgttatagcggaccgcgtgt

SEQ ID NO: 1603 - DNA, 20 bp, synthetic construct
  misc_feature 1..20: note = Synthetic construct
  source 1..20: mol_type = other DNA
gttatagcggaccgcgtgtc

SEQ ID NO: 1604 - DNA, 20 bp, synthetic construct
  misc_feature 1..20: note = Synthetic construct
  source 1..20: mol_type = other DNA
ttatagcggaccgcgtgtct

SEQ ID NO: 1605 - DNA, 20 bp, synthetic construct
  misc_feature 1..20: note = Synthetic construct
  source 1..20: mol_type = other DNA
tatagcggaccgcgtgtctg

SEQ ID NO: 1606 - DNA, 20 bp, synthetic construct
  misc_feature 1..20: note = Synthetic construct
  source 1..20: mol_type = other DNA
atagcggaccgcgtgtctga

SEQ ID NO: 1607 - DNA, 20 bp, synthetic construct
  misc_feature 1..20: note = Synthetic construct
  source 1..20: mol_type = other DNA
tagcggaccgcgtgtctgat

SEQ ID NO: 1608 - DNA, 20 bp, synthetic construct
  misc_feature 1..20: note = Synthetic construct
  source 1..20: mol_type = other DNA
agcggaccgcgtgtctgatc

SEQ ID NO: 1609 - DNA, 20 bp, synthetic construct
  misc_feature 1..20: note = Synthetic construct
  source 1..20: mol_type = other DNA
gcggaccgcgtgtctgatcc

SEQ ID NO: 1610 - DNA, 20 bp, synthetic construct
  misc_feature 1..20: note = Synthetic construct
  source 1..20: mol_type = other DNA
cggaccgcgtgtctgatcca

SEQ ID NO: 1611 - DNA, 20 bp, synthetic construct
  misc_feature 1..20: note = Synthetic construct
  source 1..20: mol_type = other DNA
ggaccgcgtgtctgatccac

SEQ ID NO: 1612 - DNA, 20 bp, synthetic construct
  misc_feature 1..20: note = Synthetic construct
  source 1..20: mol_type = other DNA
gaccgcgtgtctgatccacg

SEQ ID NO: 1613 - DNA, 20 bp, synthetic construct
  misc_feature 1..20: note = Synthetic construct
  source 1..20: mol_type = other DNA
accgcgtgtctgatccacgg

SEQ ID NO: 1614 - DNA, 20 bp, synthetic construct
  misc_feature 1..20: note = Synthetic construct
  source 1..20: mol_type = other DNA
ccgcgtgtctgatccacggc

SEQ ID NO: 1615 - DNA, 20 bp, synthetic construct
  misc_feature 1..20: note = Synthetic construct
  source 1..20: mol_type = other DNA
cgcgtgtctgatccacggcg

SEQ ID NO: 1616 - DNA, 20 bp, synthetic construct
  misc_feature 1..20: note = Synthetic construct
  source 1..20: mol_type = other DNA
gcgtgtctgatccacggcgc

SEQ ID NO: 1617 - DNA, 20 bp, synthetic construct
  misc_feature 1..20: note = Synthetic construct
  source 1..20: mol_type = other DNA
cgtgtctgatccacggcgca

SEQ ID NO: 1618 - DNA, 20 bp, synthetic construct
  misc_feature 1..20: note = Synthetic construct
  source 1..20: mol_type = other DNA
gtgtctgatccacggcgcac

SEQ ID NO: 1619 - DNA, 20 bp, synthetic construct
  misc_feature 1..20: note = Synthetic construct
  source 1..20: mol_type = other DNA
tgtctgatccacggcgcaca

SEQ ID NO: 1620 - DNA, 20 bp, synthetic construct
  misc_feature 1..20: note = Synthetic construct
  source 1..20: mol_type = other DNA
gtctgatccacggcgcacat

SEQ ID NO: 1621 - DNA, 20 bp, synthetic construct
  misc_feature 1..20: note = Synthetic construct
  source 1..20: mol_type = other DNA
tctgatccacggcgcacatt

SEQ ID NO: 1622 - DNA, 20 bp, synthetic construct
  misc_feature 1..20: note = Synthetic construct
  source 1..20: mol_type = other DNA
ctgatccacggcgcacattg

SEQ ID NO: 1623 - DNA, 20 bp, synthetic construct
  misc_feature 1..20: note = Synthetic construct
  source 1..20: mol_type = other DNA
tgatccacggcgcacattgg

SEQ ID NO: 1624 - DNA, 20 bp, synthetic construct
  misc_feature 1..20: note = Synthetic construct
  source 1..20: mol_type = other DNA
gatccacggcgcacattggt

SEQ ID NO: 1625 - DNA, 20 bp, synthetic construct
  misc_feature 1..20: note = Synthetic construct
  source 1..20: mol_type = other DNA
atccacggcgcacattggtc

SEQ ID NO: 1626 - DNA, 20 bp, synthetic construct
  misc_feature 1..20: note = Synthetic construct
  source 1..20: mol_type = other DNA
tccacggcgcacattggtct

SEQ ID NO: 1627 - DNA, 20 bp, synthetic construct
  misc_feature 1..20: note = Synthetic construct
  source 1..20: mol_type = other DNA
ccacggcgcacattggtctc

SEQ ID NO: 1628 - DNA, 20 bp, synthetic construct
  misc_feature 1..20: note = Synthetic construct
  source 1..20: mol_type = other DNA
cacggcgcacattggtctcg

SEQ ID NO: 1629 - DNA, 20 bp, synthetic construct
  misc_feature 1..20: note = Synthetic construct
  source 1..20: mol_type = other DNA
acggcgcacattggtctcgg

SEQ ID NO: 1630 - DNA, 20 bp, synthetic construct
  misc_feature 1..20: note = Synthetic construct
  source 1..20: mol_type = other DNA
cggcgcacattggtctcgga

SEQ ID NO: 1631 - DNA, 20 bp, synthetic construct
  misc_feature 1..20: note = Synthetic construct
  source 1..20: mol_type = other DNA
ggcgcacattggtctcggac

SEQ ID NO: 1632 - DNA, 20 bp, synthetic construct
  misc_feature 1..20: note = Synthetic construct
  source 1..20: mol_type = other DNA
gcgcacattggtctcggacc

SEQ ID NO: 1633 - DNA, 20 bp, synthetic construct
  misc_feature 1..20: note = Synthetic construct
  source 1..20: mol_type = other DNA
cgcacattggtctcggacca

SEQ ID NO: 1634 - DNA, 20 bp, synthetic construct
  misc_feature 1..20: note = Synthetic construct
  source 1..20: mol_type = other DNA
gcacattggtctcggaccaa

SEQ ID NO: 1635 - DNA, 20 bp, synthetic construct
  misc_feature 1..20: note = Synthetic construct
  source 1..20: mol_type = other DNA
cacattggtctcggaccaat

SEQ ID NO: 1636 - DNA, 20 bp, synthetic construct
  misc_feature 1..20: note = Synthetic construct
  source 1..20: mol_type = other DNA
acattggtctcggaccaata

SEQ ID NO: 1637 - DNA, 20 bp, synthetic construct
  misc_feature 1..20: note = Synthetic construct
  source 1..20: mol_type = other DNA
cattggtctcggaccaatag

SEQ ID NO: 1638 - DNA, 20 bp, synthetic construct
  misc_feature 1..20: note = Synthetic construct
  source 1..20: mol_type = other DNA
attggtctcggaccaataga

SEQ ID NO: 1639 - DNA, 20 bp, synthetic construct
  misc_feature 1..20: note = Synthetic construct
  source 1..20: mol_type = other DNA
ttggtctcggaccaatagag

SEQ ID NO: 1640 - DNA, 20 bp, synthetic construct
  misc_feature 1..20: note = Synthetic construct
  source 1..20: mol_type = other DNA
tggtctcggaccaatagagc

SEQ ID NO: 1641 - DNA, 20 bp, synthetic construct
  misc_feature 1..20: note = Synthetic construct
  source 1..20: mol_type = other DNA
ggtctcggaccaatagagcc

SEQ ID NO: 1642 - DNA, 20 bp, synthetic construct
  misc_feature 1..20: note = Synthetic construct
  source 1..20: mol_type = other DNA
gtctcggaccaatagagccg

SEQ ID NO: 1643 - DNA, 20 bp, synthetic construct
  misc_feature 1..20: note = Synthetic construct
  source 1..20: mol_type = other DNA
tctcggaccaatagagccgc

SEQ ID NO: 1644 - DNA, 20 bp, synthetic construct
  misc_feature 1..20: note = Synthetic construct
  source 1..20: mol_type = other DNA
ctcggaccaatagagccgct

SEQ ID NO: 1645 - DNA, 20 bp, synthetic construct
  misc_feature 1..20: note = Synthetic construct
  source 1..20: mol_type = other DNA
tcggaccaatagagccgctc

SEQ ID NO: 1646 - DNA, 20 bp, synthetic construct
  misc_feature 1..20: note = Synthetic construct
  source 1..20: mol_type = other DNA
cggaccaatagagccgctct

SEQ ID NO: 1647 - DNA, 20 bp, synthetic construct
  misc_feature 1..20: note = Synthetic construct
  source 1..20: mol_type = other DNA
ggaccaatagagccgctctc

SEQ ID NO: 1648 - DNA, 20 bp, synthetic construct
  misc_feature 1..20: note = Synthetic construct
  source 1..20: mol_type = other DNA
gaccaatagagccgctctca

SEQ ID NO: 1649 - DNA, 20 bp, synthetic construct
  misc_feature 1..20: note = Synthetic construct
  source 1..20: mol_type = other DNA
accaatagagccgctctcag

SEQ ID NO: 1650 - DNA, 20 bp, synthetic construct
  misc_feature 1..20: note = Synthetic construct
  source 1..20: mol_type = other DNA
ccaatagagccgctctcaga

SEQ ID NO: 1651 - DNA, 20 bp, synthetic construct
  misc_feature 1..20: note = Synthetic construct
  source 1..20: mol_type = other DNA
caatagagccgctctcagag

SEQ ID NO: 1652 - DNA, 20 bp, synthetic construct
  misc_feature 1..20: note = Synthetic construct
  source 1..20: mol_type = other DNA
aatagagccgctctcagagc

SEQ ID NO: 1653 - DNA, 20 bp, synthetic construct
  misc_feature 1..20: note = Synthetic construct
  source 1..20: mol_type = other DNA
atagagccgctctcagagcg

SEQ ID NO: 1654 - DNA, 20 bp, synthetic construct
  misc_feature 1..20: note = Synthetic construct
  source 1..20: mol_type = other DNA
tagagccgctctcagagcgc

SEQ ID NO: 1655 - DNA, 20 bp, synthetic construct
  misc_feature 1..20: note = Synthetic construct
  source 1..20: mol_type = other DNA
agagccgctctcagagcgcg

SEQ ID NO: 1656 - DNA, 20 bp, synthetic construct
  misc_feature 1..20: note = Synthetic construct
  source 1..20: mol_type = other DNA
gagccgctctcagagcgcgg

SEQ ID NO: 1657 - DNA, 20 bp, synthetic construct
  misc_feature 1..20: note = Synthetic construct
  source 1..20: mol_type = other DNA
agccgctctcagagcgcggg

SEQ ID NO: 1658 - DNA, 20 bp, synthetic construct
  misc_feature 1..20: note = Synthetic construct
  source 1..20: mol_type = other DNA
gccgctctcagagcgcgggg

SEQ ID NO: 1659 - DNA, 20 bp, synthetic construct
  misc_feature 1..20: note = Synthetic construct
  source 1..20: mol_type = other DNA
ccgctctcagagcgcggggg

SEQ ID NO: 1660 - DNA, 20 bp, synthetic construct
  misc_feature 1..20: note = Synthetic construct
  source 1..20: mol_type = other DNA
cgctctcagagcgcgggggg

SEQ ID NO: 1661 - DNA, 20 bp, synthetic construct
  misc_feature 1..20: note = Synthetic construct
  source 1..20: mol_type = other DNA
gctctcagagcgcggggggt

SEQ ID NO: 1662 - DNA, 20 bp, synthetic construct
  misc_feature 1..20: note = Synthetic construct
  source 1..20: mol_type = other DNA
ctctcagagcgcggggggta

SEQ ID NO: 1663 - DNA, 20 bp, synthetic construct
  misc_feature 1..20: note = Synthetic construct
  source 1..20: mol_type = other DNA
tctcagagcgcggggggtaa

SEQ ID NO: 1664 - DNA, 20 bp, synthetic construct
  misc_feature 1..20: note = Synthetic construct
  source 1..20: mol_type = other DNA
ctcagagcgcggggggtaac

SEQ ID NO: 1665 - DNA, 20 bp, synthetic construct
  misc_feature 1..20: note = Synthetic construct
  source 1..20: mol_type = other DNA
tcagagcgcggggggtaacg

SEQ ID NO: 1666 - DNA, 20 bp, synthetic construct
  misc_feature 1..20: note = Synthetic construct
  source 1..20: mol_type = other DNA
cagagcgcggggggtaacgg

SEQ ID NO: 1667 - DNA, 20 bp, synthetic construct
  misc_feature 1..20: note = Synthetic construct
  source 1..20: mol_type = other DNA
agagcgcggggggtaacggt

SEQ ID NO: 1668 - DNA, 20 bp, synthetic construct
  misc_feature 1..20: note = Synthetic construct
  source 1..20: mol_type = other DNA
gagcgcggggggtaacggtt

SEQ ID NO: 1669 - DNA, 20 bp, synthetic construct
  misc_feature 1..20: note = Synthetic construct
  source 1..20: mol_type = other DNA
agcgcggggggtaacggttg

SEQ ID NO: 1670 - DNA, 20 bp, synthetic construct
  misc_feature 1..20: note = Synthetic construct
  source 1..20: mol_type = other DNA
gcgcggggggtaacggttgc

SEQ ID NO: 1671 - DNA, 20 bp, synthetic construct
  misc_feature 1..20: note = Synthetic construct
  source 1..20: mol_type = other DNA
cgcggggggtaacggttgct

SEQ ID NO: 1672 - DNA, 20 bp, synthetic construct
  misc_feature 1..20: note = Synthetic construct
  source 1..20: mol_type = other DNA
gcggggggtaacggttgctt

SEQ ID NO: 1673 - DNA, 20 bp, synthetic construct
  misc_feature 1..20: note = Synthetic construct
  source 1..20: mol_type = other DNA
cggggggtaacggttgcttg

SEQ ID NO: 1674 - DNA, 20 bp, synthetic construct
  misc_feature 1..20: note = Synthetic construct
  source 1..20: mol_type = other DNA
ggggggtaacggttgcttgt

SEQ ID NO: 1675 - DNA, 20 bp, synthetic construct
  misc_feature 1..20: note = Synthetic construct
  source 1..20: mol_type = other DNA
gggggtaacggttgcttgtt

SEQ ID NO: 1676 - DNA, 20 bp, synthetic construct
  misc_feature 1..20: note = Synthetic construct
  source 1..20: mol_type = other DNA
ggggtaacggttgcttgttc

SEQ ID NO: 1677 - DNA, 20 bp, synthetic construct
  misc_feature 1..20: note = Synthetic construct
  source 1..20: mol_type = other DNA
gggtaacggttgcttgttca

SEQ ID NO: 1678 - DNA, 20 bp, synthetic construct
  misc_feature 1..20: note = Synthetic construct
  source 1..20: mol_type = other DNA
ggtaacggttgcttgttcag

SEQ ID NO: 1679 - DNA, 20 bp, synthetic construct
  misc_feature 1..20: note = Synthetic construct
  source 1..20: mol_type = other DNA
gtaacggttgcttgttcagc

SEQ ID NO: 1680 - DNA, 20 bp, synthetic construct
  misc_feature 1..20: note = Synthetic construct
  source 1..20: mol_type = other DNA
taacggttgcttgttcagcg

SEQ ID NO: 1681 - DNA, 20 bp, synthetic construct
  misc_feature 1..20: note = Synthetic construct
  source 1..20: mol_type = other DNA
aacggttgcttgttcagcga

SEQ ID NO: 1682 - DNA, 20 bp, synthetic construct
  misc_feature 1..20: note = Synthetic construct
  source 1..20: mol_type = other DNA
acggttgcttgttcagcgaa

SEQ ID NO: 1683 - DNA, 20 bp, synthetic construct
  misc_feature 1..20: note = Synthetic construct
  source 1..20: mol_type = other DNA
cggttgcttgttcagcgaac

SEQ ID NO: 1684 - DNA, 20 bp, synthetic construct
  misc_feature 1..20: note = Synthetic construct
  source 1..20: mol_type = other DNA
ggttgcttgttcagcgaact

SEQ ID NO: 1685 - DNA, 20 bp, synthetic construct
  misc_feature 1..20: note = Synthetic construct
  source 1..20: mol_type = other DNA
gttgcttgttcagcgaactt

SEQ ID NO: 1686 - DNA, 20 bp, synthetic construct
  misc_feature 1..20: note = Synthetic construct
  source 1..20: mol_type = other DNA
ttgcttgttcagcgaacttc

SEQ ID NO: 1687 - DNA, 20 bp, synthetic construct
  misc_feature 1..20: note = Synthetic construct
  source 1..20: mol_type = other DNA
tgcttgttcagcgaacttct

SEQ ID NO: 1688 - DNA, 20 bp, synthetic construct
  misc_feature 1..20: note = Synthetic construct
  source 1..20: mol_type = other DNA
gcttgttcagcgaacttctt

SEQ ID NO: 1689 - DNA, 20 bp, synthetic construct
  misc_feature 1..20: note = Synthetic construct
  source 1..20: mol_type = other DNA
cttgttcagcgaacttcttg

SEQ ID NO: 1690 - DNA, 20 bp, synthetic construct
  misc_feature 1..20: note = Synthetic construct
  source 1..20: mol_type = other DNA
ttgttcagcgaacttcttgt

SEQ ID NO: 1691 - DNA, 20 bp, synthetic construct
  misc_feature 1..20: note = Synthetic construct
  source 1..20: mol_type = other DNA
tgttcagcgaacttcttgta

SEQ ID NO: 1692 - DNA, 20 bp, synthetic construct
  misc_feature 1..20: note = Synthetic construct
  source 1..20: mol_type = other DNA
gttcagcgaacttcttgtaa

SEQ ID NO: 1693 - DNA, 20 bp, synthetic construct
  misc_feature 1..20: note = Synthetic construct
  source 1..20: mol_type = other DNA
ttcagcgaacttcttgtaag

SEQ ID NO: 1694 - DNA, 20 bp, synthetic construct
  misc_feature 1..20: note = Synthetic construct
  source 1..20: mol_type = other DNA
tcagcgaacttcttgtaagg

SEQ ID NO: 1695 - DNA, 20 bp, synthetic construct
  misc_feature 1..20: note = Synthetic construct
  source 1..20: mol_type = other DNA
cagcgaacttcttgtaaggc

SEQ ID NO: 1696 - DNA, 20 bp, synthetic construct
  misc_feature 1..20: note = Synthetic construct
  source 1..20: mol_type = other DNA
agcgaacttcttgtaaggcg

SEQ ID NO: 1697 - DNA, 20 bp, synthetic construct
  misc_feature 1..20: note = Synthetic construct
  source 1..20: mol_type = other DNA
gcgaacttcttgtaaggcgc

SEQ ID NO: 1698 - DNA, 20 bp, synthetic construct
  misc_feature 1..20: note = Synthetic construct
  source 1..20: mol_type = other DNA
cgaacttcttgtaaggcgct

SEQ ID NO: 1699 - DNA, 20 bp, synthetic construct
  misc_feature 1..20: note = Synthetic construct
  source 1..20: mol_type = other DNA
gaacttcttgtaaggcgctg

SEQ ID NO: 1700 - DNA, 20 bp, synthetic construct
  misc_feature 1..20: note = Synthetic construct
  source 1..20: mol_type = other DNA
aacttcttgtaaggcgctgc

SEQ ID NO: 1701 - DNA, 20 bp, synthetic construct
  misc_feature 1..20: note = Synthetic construct
  source 1..20: mol_type = other DNA
acttcttgtaaggcgctgca

SEQ ID NO: 1702 - DNA, 20 bp, synthetic construct
  misc_feature 1..20: note = Synthetic construct
  source 1..20: mol_type = other DNA
cttcttgtaaggcgctgcat

SEQ ID NO: 1703 - DNA, 20 bp, synthetic construct
  misc_feature 1..20: note = Synthetic construct
  source 1..20: mol_type = other DNA
ttcttgtaaggcgctgcatc

SEQ ID NO: 1704 - DNA, 20 bp, synthetic construct
  misc_feature 1..20: note = Synthetic construct
  source 1..20: mol_type = other DNA
tcttgtaaggcgctgcatcc

SEQ ID NO: 1705 - DNA, 20 bp, synthetic construct
  misc_feature 1..20: note = Synthetic construct
  source 1..20: mol_type = other DNA
cttgtaaggcgctgcatcct

SEQ ID NO: 1706 - DNA, 20 bp, synthetic construct
  misc_feature 1..20: note = Synthetic construct
  source 1..20: mol_type = other DNA
ttgtaaggcgctgcatcctg

SEQ ID NO: 1707 - DNA, 20 bp, synthetic construct
  misc_feature 1..20: note = Synthetic construct
  source 1..20: mol_type = other DNA
tgtaaggcgctgcatcctgc

SEQ ID NO: 1708 - DNA, 20 bp, synthetic construct
  misc_feature 1..20: note = Synthetic construct
  source 1..20: mol_type = other DNA
gtaaggcgctgcatcctgca

SEQ ID NO: 1709 - DNA, 20 bp, synthetic construct
  misc_feature 1..20: note = Synthetic construct
  source 1..20: mol_type = other DNA
taaggcgctgcatcctgcaa

SEQ ID NO: 1710 - DNA, 20 bp, synthetic construct
  misc_feature 1..20: note = Synthetic construct
  source 1..20: mol_type = other DNA
aaggcgctgcatcctgcaac

SEQ ID NO: 1711 - DNA, 20 bp, synthetic construct
  misc_feature 1..20: note = Synthetic construct
  source 1..20: mol_type = other DNA
aggcgctgcatcctgcaact

SEQ ID NO: 1712 - DNA, 20 bp, synthetic construct
  misc_feature 1..20: note = Synthetic construct
  source 1..20: mol_type = other DNA
ggcgctgcatcctgcaactt

SEQ ID NO: 1713 - DNA, 20 bp, synthetic construct
  misc_feature 1..20: note = Synthetic construct
  source 1..20: mol_type = other DNA
gcgctgcatcctgcaacttg

SEQ ID NO: 1714 - DNA, 20 bp, synthetic construct
  misc_feature 1..20: note = Synthetic construct
  source 1..20: mol_type = other DNA
cgctgcatcctgcaacttgt

SEQ ID NO: 1715 - DNA, 20 bp, synthetic construct
  misc_feature 1..20: note = Synthetic construct
  source 1..20: mol_type = other DNA
gctgcatcctgcaacttgtg

SEQ ID NO: 1716 - DNA, 20 bp, synthetic construct
  misc_feature 1..20: note = Synthetic construct
  source 1..20: mol_type = other DNA
ctgcatcctgcaacttgtgc

SEQ ID NO: 1717 - DNA, 20 bp, synthetic construct
  misc_feature 1..20: note = Synthetic construct
  source 1..20: mol_type = other DNA
tgcatcctgcaacttgtgcc

SEQ ID NO: 1718 - DNA, 20 bp, synthetic construct
  misc_feature 1..20: note = Synthetic construct
  source 1..20: mol_type = other DNA
gcatcctgcaacttgtgccc

SEQ ID NO: 1719 - DNA, 20 bp, synthetic construct
  misc_feature 1..20: note = Synthetic construct
  source 1..20: mol_type = other DNA
catcctgcaacttgtgcccc

SEQ ID NO: 1720 - DNA, 20 bp, synthetic construct
  misc_feature 1..20: note = Synthetic construct
  source 1..20: mol_type = other DNA
atcctgcaacttgtgcccca

SEQ ID NO: 1721 - DNA, 20 bp, synthetic construct
  misc_feature 1..20: note = Synthetic construct
  source 1..20: mol_type = other DNA
tcctgcaacttgtgccccat

SEQ ID NO: 1722 - DNA, 20 bp, synthetic construct
  misc_feature 1..20: note = Synthetic construct
  source 1..20: mol_type = other DNA
cctgcaacttgtgccccata

SEQ ID NO: 1723 - DNA, 20 bp, synthetic construct
  misc_feature 1..20: note = Synthetic construct
  source 1..20: mol_type = other DNA
ctgcaacttgtgccccatag

SEQ ID NO: 1724 - DNA, 20 bp, synthetic construct
  misc_feature 1..20: note = Synthetic construct
  source 1..20: mol_type = other DNA
tgcaacttgtgccccatagg

SEQ ID NO: 1725 - DNA, 20 bp, synthetic construct
  misc_feature 1..20: note = Synthetic construct
  source 1..20: mol_type = other DNA
gcaacttgtgccccatagga

SEQ ID NO: 1726 - DNA, 20 bp, synthetic construct
  misc_feature 1..20: note = Synthetic construct
  source 1..20: mol_type = other DNA
caacttgtgccccataggag

SEQ ID NO: 1727 - DNA, 20 bp, synthetic construct
  misc_feature 1..20: note = Synthetic construct
  source 1..20: mol_type = other DNA
aacttgtgccccataggagc

SEQ ID NO: 1728 - DNA, 20 bp, synthetic construct
  misc_feature 1..20: note = Synthetic construct
  source 1..20: mol_type = other DNA
acttgtgccccataggagca

SEQ ID NO: 1729 - DNA, 20 bp, synthetic construct
  misc_feature 1..20: note = Synthetic construct
  source 1..20: mol_type = other DNA
cttgtgccccataggagcac

SEQ ID NO: 1730 - DNA, 20 bp, synthetic construct
  misc_feature 1..20: note = Synthetic construct
  source 1..20: mol_type = other DNA
ttgtgccccataggagcacc

SEQ ID NO: 1731 - DNA, 20 bp, synthetic construct
  misc_feature 1..20: note = Synthetic construct
  source 1..20: mol_type = other DNA
tgtgccccataggagcaccg

SEQ ID NO: 1732 - DNA, 20 bp, synthetic construct
  misc_feature 1..20: note = Synthetic construct
  source 1..20: mol_type = other DNA
gtgccccataggagcaccgt

SEQ ID NO: 1733 - DNA, 20 bp, synthetic construct
  misc_feature 1..20: note = Synthetic construct
  source 1..20: mol_type = other DNA
tgccccataggagcaccgtt

SEQ ID NO: 1734 - DNA, 20 bp, synthetic construct
  misc_feature 1..20: note = Synthetic construct
  source 1..20: mol_type = other DNA
gccccataggagcaccgttg

SEQ ID NO: 1735 - DNA, 20 bp, synthetic construct
  misc_feature 1..20: note = Synthetic construct
  source 1..20: mol_type = other DNA
ccccataggagcaccgttgg

SEQ ID NO: 1736 - DNA, 20 bp, synthetic construct
  misc_feature 1..20: note = Synthetic construct
  source 1..20: mol_type = other DNA
cccataggagcaccgttgga

SEQ ID NO: 1737 - DNA, 20 bp, synthetic construct
  misc_feature 1..20: note = Synthetic construct
  source 1..20: mol_type = other DNA
ccataggagcaccgttggag

SEQ ID NO: 1738 - DNA, 20 bp, synthetic construct
  misc_feature 1..20: note = Synthetic construct
  source 1..20: mol_type = other DNA
cataggagcaccgttggaga

SEQ ID NO: 1739 - DNA, 20 bp, synthetic construct
  misc_feature 1..20: note = Synthetic construct
  source 1..20: mol_type = other DNA
ataggagcaccgttggagaa

SEQ ID NO: 1740 - DNA, 20 bp, synthetic construct
  misc_feature 1..20: note = Synthetic construct
  source 1..20: mol_type = other DNA
taggagcaccgttggagaac

SEQ ID NO: 1741 - DNA, 20 bp, synthetic construct
  misc_feature 1..20: note = Synthetic construct
  source 1..20: mol_type = other DNA
aggagcaccgttggagaacg

SEQ ID NO: 1742 - DNA, 20 bp, synthetic construct
  misc_feature 1..20: note = Synthetic construct
  source 1..20: mol_type = other DNA
ggagcaccgttggagaacgt

SEQ ID NO: 1743 - DNA, 20 bp, synthetic construct
  misc_feature 1..20: note = Synthetic construct
  source 1..20: mol_type = other DNA
gagcaccgttggagaacgtg

SEQ ID NO: 1744 - DNA, 20 bp, synthetic construct
  misc_feature 1..20: note = Synthetic construct
  source 1..20: mol_type = other DNA
agcaccgttggagaacgtgc

SEQ ID NO: 1745 - DNA, 20 bp, synthetic construct
  misc_feature 1..20: note = Synthetic construct
  source 1..20: mol_type = other DNA
gcaccgttggagaacgtgca

SEQ ID NO: 1746 - DNA, 20 bp, synthetic construct
  misc_feature 1..20: note = Synthetic construct
  source 1..20: mol_type = other DNA
caccgttggagaacgtgcat

SEQ ID NO: 1747 - DNA, 20 bp, synthetic construct
  misc_feature 1..20: note = Synthetic construct
  source 1..20: mol_type = other DNA
accgttggagaacgtgcatt

SEQ ID NO: 1748 - DNA, 20 bp, synthetic construct
  misc_feature 1..20: note = Synthetic construct
  source 1..20: mol_type = other DNA
ccgttggagaacgtgcattg

SEQ ID NO: 1749 - DNA, 20 bp, synthetic construct
  misc_feature 1..20: note = Synthetic construct
  source 1..20: mol_type = other DNA
cgttggagaacgtgcattgc

SEQ ID NO: 1750 - DNA, 20 bp, synthetic construct
  misc_feature 1..20: note = Synthetic construct
  source 1..20: mol_type = other DNA
gttggagaacgtgcattgcc

SEQ ID NO: 1751 - DNA, 20 bp, synthetic construct
  misc_feature 1..20: note = Synthetic construct
  source 1..20: mol_type = other DNA
ttggagaacgtgcattgccc

SEQ ID NO: 1752 - DNA, 20 bp, synthetic construct
  misc_feature 1..20: note = Synthetic construct
  source 1..20: mol_type = other DNA
tggagaacgtgcattgccca

SEQ ID NO: 1753 - DNA, 20 bp, synthetic construct
  misc_feature 1..20: note = Synthetic construct
  source 1..20: mol_type = other DNA
ggagaacgtgcattgcccaa

SEQ ID NO: 1754 - DNA, 20 bp, synthetic construct
  misc_feature 1..20: note = Synthetic construct
  source 1..20: mol_type = other DNA
gagaacgtgcattgcccaaa

SEQ ID NO: 1755 - DNA, 20 bp, synthetic construct
  misc_feature 1..20: note = Synthetic construct
  source 1..20: mol_type = other DNA
agaacgtgcattgcccaaac

SEQ ID NO: 1756 - DNA, 20 bp, synthetic construct
  misc_feature 1..20: note = Synthetic construct
  source 1..20: mol_type = other DNA
gaacgtgcattgcccaaaca

SEQ ID NO: 1757 - DNA, 20 bp, synthetic construct
  misc_feature 1..20: note = Synthetic construct
  source 1..20: mol_type = other DNA
aacgtgcattgcccaaacaa

SEQ ID NO: 1758 - DNA, 20 bp, synthetic construct
  misc_feature 1..20: note = Synthetic construct
  source 1..20: mol_type = other DNA
acgtgcattgcccaaacaac

SEQ ID NO: 1759 - DNA, 20 bp, synthetic construct
  misc_feature 1..20: note = Synthetic construct
  source 1..20: mol_type = other DNA
cgtgcattgcccaaacaacg

SEQ ID NO: 1760 - DNA, 20 bp, synthetic construct
  misc_feature 1..20: note = Synthetic construct
  source 1..20: mol_type = other DNA
gtgcattgcccaaacaacga

SEQ ID NO: 1761 - DNA, 20 bp, synthetic construct
  misc_feature 1..20: note = Synthetic construct
  source 1..20: mol_type = other DNA
tgcattgcccaaacaacgac

SEQ ID NO: 1762 - DNA, 20 bp, synthetic construct
  misc_feature 1..20: note = Synthetic construct
  source 1..20: mol_type = other DNA
gcattgcccaaacaacgacg

SEQ ID NO: 1763 - DNA, 20 bp, synthetic construct
  misc_feature 1..20: note = Synthetic construct
  source 1..20: mol_type = other DNA
cattgcccaaacaacgacga

SEQ ID NO: 1764 - DNA, 20 bp, synthetic construct
  misc_feature 1..20: note = Synthetic construct
  source 1..20: mol_type = other DNA
attgcccaaacaacgacgat

SEQ ID NO: 1765 - DNA, 20 bp, synthetic construct
  misc_feature 1..20: note = Synthetic construct
  source 1..20: mol_type = other DNA
ttgcccaaacaacgacgatc

SEQ ID NO: 1766 - DNA, 20 bp, synthetic construct
  misc_feature 1..20: note = Synthetic construct
  source 1..20: mol_type = other DNA
tgcccaaacaacgacgatcg

SEQ ID NO: 1767 - DNA, 20 bp, synthetic construct
  misc_feature 1..20: note = Synthetic construct
  source 1..20: mol_type = other DNA
gcccaaacaacgacgatcgg

SEQ ID NO: 1768 - DNA, 20 bp, synthetic construct
  misc_feature 1..20: note = Synthetic construct
  source 1..20: mol_type = other DNA
cccaaacaacgacgatcggt

SEQ ID NO: 1769 - DNA, 20 bp, synthetic construct
  misc_feature 1..20: note = Synthetic construct
  source 1..20: mol_type = other DNA
ccaaacaacgacgatcggta

SEQ ID NO: 1770 - DNA, 20 bp, synthetic construct
  misc_feature 1..20: note = Synthetic construct
  source 1..20: mol_type = other DNA
caaacaacgacgatcggtag

SEQ ID NO: 1771 - DNA, 20 bp, synthetic construct
  misc_feature 1..20: note = Synthetic construct
  source 1..20: mol_type = other DNA
aaacaacgacgatcggtagc

SEQ ID NO: 1772 - DNA, 20 bp, synthetic construct
  misc_feature 1..20: note = Synthetic construct
  source 1..20: mol_type = other DNA
aacaacgacgatcggtagcc

SEQ ID NO: 1773 - DNA, 20 bp, synthetic construct
  misc_feature 1..20: note = Synthetic construct
  source 1..20: mol_type = other DNA
acaacgacgatcggtagcca

SEQ ID NO: 1774 - DNA, 20 bp, synthetic construct
  misc_feature 1..20: note = Synthetic construct
  source 1..20: mol_type = other DNA
caacgacgatcggtagccag

SEQ ID NO: 1775 - DNA, 20 bp, synthetic construct
  misc_feature 1..20: note = Synthetic construct
  source 1..20: mol_type = other DNA
aacgacgatcggtagccaga

SEQ ID NO: 1776 - DNA, 20 bp, synthetic construct
  misc_feature 1..20: note = Synthetic construct
  source 1..20: mol_type = other DNA
acgacgatcggtagccagag

SEQ ID NO: 1777 - DNA, 20 bp, synthetic construct
  misc_feature 1..20: note = Synthetic construct
  source 1..20: mol_type = other DNA
cgacgatcggtagccagaga

SEQ ID NO: 1778 - DNA, 20 bp, synthetic construct
  misc_feature 1..20: note = Synthetic construct
  source 1..20: mol_type = other DNA
gacgatcggtagccagagag

SEQ ID NO: 1779 - DNA, 20 bp, synthetic construct
  misc_feature 1..20: note = Synthetic construct
  source 1..20: mol_type = other DNA
acgatcggtagccagagagg

SEQ ID NO: 1780 - DNA, 20 bp, synthetic construct
  misc_feature 1..20: note = Synthetic construct
  source 1..20: mol_type = other DNA
cgatcggtagccagagagga

SEQ ID NO: 1781 - DNA, 20 bp, synthetic construct
  misc_feature 1..20: note = Synthetic construct
  source 1..20: mol_type = other DNA
gatcggtagccagagaggag

SEQ ID NO: 1782 - DNA, 20 bp, synthetic construct
  misc_feature 1..20: note = Synthetic construct
  source 1..20: mol_type = other DNA
atcggtagccagagaggagg

SEQ ID NO: 1783 - DNA, 20 bp, synthetic construct
  misc_feature 1..20: note = Synthetic construct
  source 1..20: mol_type = other DNA
tcggtagccagagaggaggt

SEQ ID NO: 1784 - DNA, 20 bp, synthetic construct
  misc_feature 1..20: note = Synthetic construct
  source 1..20: mol_type = other DNA
cggtagccagagaggaggtt

SEQ ID NO: 1785 - DNA, 20 bp, synthetic construct
  misc_feature 1..20: note = Synthetic construct
  source 1..20: mol_type = other DNA
ggtagccagagaggaggttg

SEQ ID NO: 1786 - DNA, 20 bp, synthetic construct
  misc_feature 1..20: note = Synthetic construct
  source 1..20: mol_type = other DNA
gtagccagagaggaggttgc

SEQ ID NO: 1787 - DNA, 20 bp, synthetic construct
  misc_feature 1..20: note = Synthetic construct
  source 1..20: mol_type = other DNA
tagccagagaggaggttgcc

SEQ ID NO: 1788 - DNA, 20 bp, synthetic construct
  misc_feature 1..20: note = Synthetic construct
  source 1..20: mol_type = other DNA
agccagagaggaggttgcca

SEQ ID NO: 1789 - DNA, 20 bp, synthetic construct
  misc_feature 1..20: note = Synthetic construct
  source 1..20: mol_type = other DNA
gccagagaggaggttgccaa

SEQ ID NO: 1790 - DNA, 20 bp, synthetic construct
  misc_feature 1..20: note = Synthetic construct
  source 1..20: mol_type = other DNA
ccagagaggaggttgccaat

SEQ ID NO: 1791 - DNA, 20 bp, synthetic construct
  misc_feature 1..20: note = Synthetic construct
  source 1..20: mol_type = other DNA
cagagaggaggttgccaata

SEQ ID NO: 1792 - DNA, 20 bp, synthetic construct
  misc_feature 1..20: note = Synthetic construct
  source 1..20: mol_type = other DNA
agagaggaggttgccaataa

SEQ ID NO: 1793 - DNA, 20 bp, synthetic construct
  misc_feature 1..20: note = Synthetic construct
  source 1..20: mol_type = other DNA
gagaggaggttgccaataag

SEQ ID NO: 1794 - DNA, 20 bp, synthetic construct
  misc_feature 1..20: note = Synthetic construct
  source 1..20: mol_type = other DNA
agaggaggttgccaataagg

SEQ ID NO: 1795 - DNA, 20 bp, synthetic construct
  misc_feature 1..20: note = Synthetic construct
  source 1..20: mol_type = other DNA
gaggaggttgccaataaggc

SEQ ID NO: 1796 - DNA, 20 bp, synthetic construct
  misc_feature 1..20: note = Synthetic construct
  source 1..20: mol_type = other DNA
aggaggttgccaataaggct

SEQ ID NO: 1797 - DNA, 20 bp, synthetic construct
  misc_feature 1..20: note = Synthetic construct
  source 1..20: mol_type = other DNA
ggaggttgccaataaggcta

SEQ ID NO: 1798 - DNA, 20 bp, synthetic construct
  misc_feature 1..20: note = Synthetic construct
  source 1..20: mol_type = other DNA
gaggttgccaataaggctac

SEQ ID NO: 1799 - DNA, 20 bp, synthetic construct
  misc_feature 1..20: note = Synthetic construct
  source 1..20: mol_type = other DNA
aggttgccaataaggctacg

SEQ ID NO: 1800 - DNA, 20 bp, synthetic construct
  misc_feature 1..20: note = Synthetic construct
  source 1..20: mol_type = other DNA
ggttgccaataaggctacgg

SEQ ID NO: 1801 - DNA, 20 bp, synthetic construct
  misc_feature 1..20: note = Synthetic construct
  source 1..20: mol_type = other DNA
gttgccaataaggctacgga

SEQ ID NO: 1802 - DNA, 20 bp, synthetic construct
  misc_feature 1..20: note = Synthetic construct
  source 1..20: mol_type = other DNA
ttgccaataaggctacggat

SEQ ID NO: 1803 - DNA, 20 bp, synthetic construct
  misc_feature 1..20: note = Synthetic construct
  source 1..20: mol_type = other DNA
tgccaataaggctacggatg

SEQ ID NO: 1804 - DNA, 20 bp, synthetic construct
  misc_feature 1..20: note = Synthetic construct
  source 1..20: mol_type = other DNA
gccaataaggctacggatgc

SEQ ID NO: 1805 - DNA, 20 bp, synthetic construct
  misc_feature 1..20: note = Synthetic construct
  source 1..20: mol_type = other DNA
ccaataaggctacggatgct

SEQ ID NO: 1806 - DNA, 20 bp, synthetic construct
  misc_feature 1..20: note = Synthetic construct
  source 1..20: mol_type = other DNA
caataaggctacggatgctg

SEQ ID NO: 1807 - DNA, 20 bp, synthetic construct
  misc_feature 1..20: note = Synthetic construct
  source 1..20: mol_type = other DNA
aataaggctacggatgctgg

SEQ ID NO: 1808 - DNA, 20 bp, synthetic construct
  misc_feature 1..20: note = Synthetic construct
  source 1..20: mol_type = other DNA
ataaggctacggatgctggt

SEQ ID NO: 1809 - DNA, 20 bp, synthetic construct
  misc_feature 1..20: note = Synthetic construct
  source 1..20: mol_type = other DNA
taaggctacggatgctggtt

SEQ ID NO: 1810 - DNA, 20 bp, synthetic construct
  misc_feature 1..20: note = Synthetic construct
  source 1..20: mol_type = other DNA
aaggctacggatgctggttt

SEQ ID NO: 1811 - DNA, 20 bp, synthetic construct
  misc_feature 1..20: note = Synthetic construct
  source 1..20: mol_type = other DNA
aggctacggatgctggtttg

SEQ ID NO: 1812 - DNA, 20 bp, synthetic construct
  misc_feature 1..20: note = Synthetic construct
  source 1..20: mol_type = other DNA
ggctacggatgctggtttgt

SEQ ID NO: 1813 - DNA, 20 bp, synthetic construct
  misc_feature 1..20: note = Synthetic construct
  source 1..20: mol_type = other DNA
gctacggatgctggtttgta

SEQ ID NO: 1814 - DNA, 20 bp, synthetic construct
  misc_feature 1..20: note = Synthetic construct
  source 1..20: mol_type = other DNA
ctacggatgctggtttgtaa

SEQ ID NO: 1815 - DNA, 20 bp, synthetic construct
  misc_feature 1..20: note = Synthetic construct
  source 1..20: mol_type = other DNA
tacggatgctggtttgtaaa

SEQ ID NO: 1816 - DNA, 20 bp, synthetic construct
  misc_feature 1..20: note = Synthetic construct
  source 1..20: mol_type = other DNA
acggatgctggtttgtaaaa

SEQ ID NO: 1817 - DNA, 20 bp, synthetic construct
  misc_feature 1..20: note = Synthetic construct
  source 1..20: mol_type = other DNA
cggatgctggtttgtaaaac

SEQ ID NO: 1818 - DNA, 20 bp, synthetic construct
  misc_feature 1..20: note = Synthetic construct
  source 1..20: mol_type = other DNA
ggatgctggtttgtaaaaca

SEQ ID NO: 1819 - DNA, 20 bp, synthetic construct
  misc_feature 1..20: note = Synthetic construct
  source 1..20: mol_type = other DNA
gatgctggtttgtaaaacat

SEQ ID NO: 1820 - DNA, 20 bp, synthetic construct
  misc_feature 1..20: note = Synthetic construct
  source 1..20: mol_type = other DNA
atgctggtttgtaaaacatc

SEQ ID NO: 1821 - DNA, 20 bp, synthetic construct
  misc_feature 1..20: note = Synthetic construct
  source 1..20: mol_type = other DNA
tgctggtttgtaaaacatcc

SEQ ID NO: 1822 - DNA, 20 bp, synthetic construct
  misc_feature 1..20: note = Synthetic construct
  source 1..20: mol_type = other DNA
gctggtttgtaaaacatccg

SEQ ID NO: 1823 - DNA, 20 bp, synthetic construct
  misc_feature 1..20: note = Synthetic construct
  source 1..20: mol_type = other DNA
ctggtttgtaaaacatccgg

SEQ ID NO: 1824 - DNA, 20 bp, synthetic construct
  misc_feature 1..20: note = Synthetic construct
  source 1..20: mol_type = other DNA
tggtttgtaaaacatccgga

SEQ ID NO: 1825 - DNA, 20 bp, synthetic construct
  misc_feature 1..20: note = Synthetic construct
  source 1..20: mol_type = other DNA
ggtttgtaaaacatccggat

SEQ ID NO: 1826 - DNA, 20 bp, synthetic construct
  misc_feature 1..20: note = Synthetic construct
  source 1..20: mol_type = other DNA
gtttgtaaaacatccggatc

SEQ ID NO: 1827 - DNA, 20 bp, synthetic construct
  misc_feature 1..20: note = Synthetic construct
  source 1..20: mol_type = other DNA
tttgtaaaacatccggatcc

SEQ ID NO: 1828 - DNA, 20 bp, synthetic construct
  misc_feature 1..20: note = Synthetic construct
  source 1..20: mol_type = other DNA
ttgtaaaacatccggatccc

SEQ ID NO: 1829 - DNA, 20 bp, synthetic construct
  misc_feature 1..20: note = Synthetic construct
  source 1..20: mol_type = other DNA
tgtaaaacatccggatccca

SEQ ID NO: 1830 - DNA, 20 bp, synthetic construct
  misc_feature 1..20: note = Synthetic construct
  source 1..20: mol_type = other DNA
gtaaaacatccggatcccat

SEQ ID NO: 1831 - DNA, 20 bp, synthetic construct
  misc_feature 1..20: note = Synthetic construct
  source 1..20: mol_type = other DNA
taaaacatccggatcccatg

SEQ ID NO: 1832 - DNA, 20 bp, synthetic construct
  misc_feature 1..20: note = Synthetic construct
  source 1..20: mol_type = other DNA
aaaacatccggatcccatga

SEQ ID NO: 1833 - DNA, 20 bp, synthetic construct
  misc_feature 1..20: note = Synthetic construct
  source 1..20: mol_type = other DNA
aaacatccggatcccatgac

SEQ ID NO: 1834 - DNA, 20 bp, synthetic construct
  misc_feature 1..20: note = Synthetic construct
  source 1..20: mol_type = other DNA
aacatccggatcccatgaca

SEQ ID NO: 1835 - DNA, 20 bp, synthetic construct
  misc_feature 1..20: note = Synthetic construct
  source 1..20: mol_type = other DNA
acatccggatcccatgacaa

SEQ ID NO: 1836 - DNA, 20 bp, synthetic construct
  misc_feature 1..20: note = Synthetic construct
  source 1..20: mol_type = other DNA
catccggatcccatgacaag

SEQ ID NO: 1837 - DNA, 20 bp, synthetic construct
  misc_feature 1..20: note = Synthetic construct
  source 1..20: mol_type = other DNA
atccggatcccatgacaagg

SEQ ID NO: 1838 - DNA, 20 bp, synthetic construct
  misc_feature 1..20: note = Synthetic construct
  source 1..20: mol_type = other DNA
tccggatcccatgacaagga

SEQ ID NO: 1839 - DNA, 20 bp, synthetic construct
  misc_feature 1..20: note = Synthetic construct
  source 1..20: mol_type = other DNA
ccggatcccatgacaaggat

SEQ ID NO: 1840 - DNA, 20 bp, synthetic construct
  misc_feature 1..20: note = Synthetic construct
  source 1..20: mol_type = other DNA
cggatcccatgacaaggatt

SEQ ID NO: 1841 - DNA, 20 bp, synthetic construct
  misc_feature 1..20: note = Synthetic construct
  source 1..20: mol_type = other DNA
ggatcccatgacaaggattt

SEQ ID NO: 1842 - DNA, 20 bp, synthetic construct
  misc_feature 1..20: note = Synthetic construct
  source 1..20: mol_type = other DNA
gatcccatgacaaggatttg

SEQ ID NO: 1843 - DNA, 20 bp, synthetic construct
  misc_feature 1..20: note = Synthetic construct
  source 1..20: mol_type = other DNA
atcccatgacaaggatttgt

SEQ ID NO: 1844 - DNA, 20 bp, synthetic construct
  misc_feature 1..20: note = Synthetic construct
  source 1..20: mol_type = other DNA
tcccatgacaaggatttgtc

SEQ ID NO: 1845 - DNA, 20 bp, synthetic construct
  misc_feature 1..20: note = Synthetic construct
  source 1..20: mol_type = other DNA
cccatgacaaggatttgtca

SEQ ID NO: 1846 - DNA, 20 bp, synthetic construct
  misc_feature 1..20: note = Synthetic construct
  source 1..20: mol_type = other DNA
ccatgacaaggatttgtcat

SEQ ID NO: 1847 - DNA, 20 bp, synthetic construct
  misc_feature 1..20: note = Synthetic construct
  source 1..20: mol_type = other DNA
catgacaaggatttgtcatg

SEQ ID NO: 1848 - DNA, 20 bp, synthetic construct
  misc_feature 1..20: note = Synthetic construct
  source 1..20: mol_type = other DNA
atgacaaggatttgtcatgt

SEQ ID NO: 1849 - DNA, 20 bp, synthetic construct
  misc_feature 1..20: note = Synthetic construct
  source 1..20: mol_type = other DNA
tgacaaggatttgtcatgta

SEQ ID NO: 1850 - DNA, 20 bp, synthetic construct
  misc_feature 1..20: note = Synthetic construct
  source 1..20: mol_type = other DNA
gacaaggatttgtcatgtaa

SEQ ID NO: 1851 - DNA, 20 bp, synthetic construct
  misc_feature 1..20: note = Synthetic construct
  source 1..20: mol_type = other DNA
acaaggatttgtcatgtaag

SEQ ID NO: 1852 - DNA, 20 bp, synthetic construct
  misc_feature 1..20: note = Synthetic construct
  source 1..20: mol_type = other DNA
caaggatttgtcatgtaaga

SEQ ID NO: 1853 - DNA, 20 bp, synthetic construct
  misc_feature 1..20: note = Synthetic construct
  source 1..20: mol_type = other DNA
aaggatttgtcatgtaagaa

SEQ ID NO: 1854 - DNA, 20 bp, synthetic construct
  misc_feature 1..20: note = Synthetic construct
  source 1..20: mol_type = other DNA
aggatttgtcatgtaagaaa

SEQ ID NO: 1855 - DNA, 20 bp, synthetic construct
  misc_feature 1..20: note = Synthetic construct
  source 1..20: mol_type = other DNA
ggatttgtcatgtaagaaac

SEQ ID NO: 1856 - DNA, 20 bp, synthetic construct
  misc_feature 1..20: note = Synthetic construct
  source 1..20: mol_type = other DNA
gatttgtcatgtaagaaacc

SEQ ID NO: 1857 - DNA, 20 bp, synthetic construct
  misc_feature 1..20: note = Synthetic construct
  source 1..20: mol_type = other DNA
atttgtcatgtaagaaacct

SEQ ID NO: 1858 - DNA, 20 bp, synthetic construct
  misc_feature 1..20: note = Synthetic construct
  source 1..20: mol_type = other DNA
tttgtcatgtaagaaacctt

SEQ ID NO: 1859 - DNA, 20 bp, synthetic construct
  misc_feature 1..20: note = Synthetic construct
  source 1..20: mol_type = other DNA
ttgtcatgtaagaaaccttc

SEQ ID NO: 1860 - DNA, 20 bp, synthetic construct
  misc_feature 1..20: note = Synthetic construct
  source 1..20: mol_type = other DNA
tgtcatgtaagaaaccttct

SEQ ID NO: 1861 - DNA, 20 bp, synthetic construct
  misc_feature 1..20: note = Synthetic construct
  source 1..20: mol_type = other DNA
gtcatgtaagaaaccttctc

SEQ ID NO: 1862 - DNA, 20 bp, synthetic construct
  misc_feature 1..20: note = Synthetic construct
  source 1..20: mol_type = other DNA
tcatgtaagaaaccttctct

SEQ ID NO: 1863 - DNA, 20 bp, synthetic construct
  misc_feature 1..20: note = Synthetic construct
  source 1..20: mol_type = other DNA
catgtaagaaaccttctcta

SEQ ID NO: 1864 - DNA, 20 bp, synthetic construct
  misc_feature 1..20: note = Synthetic construct
  source 1..20: mol_type = other DNA
atgtaagaaaccttctctat

SEQ ID NO: 1865 - DNA, 20 bp, synthetic construct
  misc_feature 1..20: note = Synthetic construct
  source 1..20: mol_type = other DNA
tgtaagaaaccttctctatt

SEQ ID NO: 1866 - DNA, 20 bp, synthetic construct
  misc_feature 1..20: note = Synthetic construct
  source 1..20: mol_type = other DNA
gtaagaaaccttctctattt

SEQ ID NO: 1867 - DNA, 20 bp, synthetic construct
  misc_feature 1..20: note = Synthetic construct
  source 1..20: mol_type = other DNA
taagaaaccttctctattta

SEQ ID NO: 1868 - DNA, 20 bp, synthetic construct
  misc_feature 1..20: note = Synthetic construct
  source 1..20: mol_type = other DNA
aagaaaccttctctatttat

SEQ ID NO: 1869 - DNA, 20 bp, synthetic construct
  misc_feature 1..20: note = Synthetic construct
  source 1..20: mol_type = other DNA
agaaaccttctctatttatc

SEQ ID NO: 1870 - DNA, 20 bp, synthetic construct
  misc_feature 1..20: note = Synthetic construct
  source 1..20: mol_type = other DNA
gaaaccttctctatttatct

SEQ ID NO: 1871 - DNA, 20 bp, synthetic construct
  misc_feature 1..20: note = Synthetic construct
  source 1..20: mol_type = other DNA
aaaccttctctatttatctg

SEQ ID NO: 1872 - DNA, 20 bp, synthetic construct
  misc_feature 1..20: note = Synthetic construct
  source 1..20: mol_type = other DNA
aaccttctctatttatctga

SEQ ID NO: 1873 - DNA, 20 bp, synthetic construct
  misc_feature 1..20: note = Synthetic construct
  source 1..20: mol_type = other DNA
accttctctatttatctgac

SEQ ID NO: 1874 - DNA, 20 bp, synthetic construct
  misc_feature 1..20: note = Synthetic construct
  source 1..20: mol_type = other DNA
ccttctctatttatctgacc

SEQ ID NO: 1875 - DNA, 20 bp, synthetic construct
  misc_feature 1..20: note = Synthetic construct
  source 1..20: mol_type = other DNA
cttctctatttatctgaccg

SEQ ID NO: 1876 - DNA, 20 bp, synthetic construct
  misc_feature 1..20: note = Synthetic construct
  source 1..20: mol_type = other DNA
ttctctatttatctgaccgc

SEQ ID NO: 1877 - DNA, 20 bp, synthetic construct
  misc_feature 1..20: note = Synthetic construct
  source 1..20: mol_type = other DNA
tctctatttatctgaccgcg

SEQ ID NO: 1878 - DNA, 20 bp, synthetic construct
  misc_feature 1..20: note = Synthetic construct
  source 1..20: mol_type = other DNA
ctctatttatctgaccgcga

SEQ ID NO: 1879 - DNA, 20 bp, synthetic construct
  misc_feature 1..20: note = Synthetic construct
  source 1..20: mol_type = other DNA
tctatttatctgaccgcgat

SEQ ID NO: 1880 - DNA, 20 bp, synthetic construct
  misc_feature 1..20: note = Synthetic construct
  source 1..20: mol_type = other DNA
ctatttatctgaccgcgatc

SEQ ID NO: 1881 - DNA, 20 bp, synthetic construct
  misc_feature 1..20: note = Synthetic construct
  source 1..20: mol_type = other DNA
tatttatctgaccgcgatca

SEQ ID NO: 1882 - DNA, 20 bp, synthetic construct
  misc_feature 1..20: note = Synthetic construct
  source 1..20: mol_type = other DNA
atttatctgaccgcgatcac

SEQ ID NO: 1883 - DNA, 20 bp, synthetic construct
  misc_feature 1..20: note = Synthetic construct
  source 1..20: mol_type = other DNA
tttatctgaccgcgatcacc

SEQ ID NO: 1884 - DNA, 20 bp, synthetic construct
  misc_feature 1..20: note = Synthetic construct
  source 1..20: mol_type = other DNA
ttatctgaccgcgatcacca

SEQ ID NO: 1885 - DNA, 20 bp, synthetic construct
  misc_feature 1..20: note = Synthetic construct
  source 1..20: mol_type = other DNA
tatctgaccgcgatcaccat

SEQ ID NO: 1886 - DNA, 20 bp, synthetic construct
  misc_feature 1..20: note = Synthetic construct
  source 1..20: mol_type = other DNA
atctgaccgcgatcaccatt

SEQ ID NO: 1887 - DNA, 20 bp, synthetic construct
  misc_feature 1..20: note = Synthetic construct
  source 1..20: mol_type = other DNA
tctgaccgcgatcaccattc

SEQ ID NO: 1888 - DNA, 20 bp, synthetic construct
  misc_feature 1..20: note = Synthetic construct
  source 1..20: mol_type = other DNA
ctgaccgcgatcaccattcg

SEQ ID NO: 1889 - DNA, 20 bp, synthetic construct
  misc_feature 1..20: note = Synthetic construct
  source 1..20: mol_type = other DNA
tgaccgcgatcaccattcgc

SEQ ID NO: 1890 - DNA, 20 bp, synthetic construct
  misc_feature 1..20: note = Synthetic construct
  source 1..20: mol_type = other DNA
gaccgcgatcaccattcgcc

SEQ ID NO: 1891 - DNA, 20 bp, synthetic construct
  misc_feature 1..20: note = Synthetic construct
  source 1..20: mol_type = other DNA
accgcgatcaccattcgcct

SEQ ID NO: 1892 - DNA, 20 bp, synthetic construct
  misc_feature 1..20: note = Synthetic construct
  source 1..20: mol_type = other DNA
ccgcgatcaccattcgcctc

SEQ ID NO: 1893 - DNA, 20 bp, synthetic construct
  misc_feature 1..20: note = Synthetic construct
  source 1..20: mol_type = other DNA
cgcgatcaccattcgcctcc

SEQ ID NO: 1894 - DNA, 20 bp, synthetic construct
  misc_feature 1..20: note = Synthetic construct
  source 1..20: mol_type = other DNA
gcgatcaccattcgcctccc

SEQ ID NO: 1895 - DNA, 20 bp, synthetic construct
  misc_feature 1..20: note = Synthetic construct
  source 1..20: mol_type = other DNA
cgatcaccattcgcctcccg

SEQ ID NO: 1896 - DNA, 20 bp, synthetic construct
  misc_feature 1..20: note = Synthetic construct
  source 1..20: mol_type = other DNA
gatcaccattcgcctcccgt

SEQ ID NO: 1897 - DNA, 20 bp, synthetic construct
  misc_feature 1..20: note = Synthetic construct
  source 1..20: mol_type = other DNA
atcaccattcgcctcccgta

SEQ ID NO: 1898 - DNA, 20 bp, synthetic construct
  misc_feature 1..20: note = Synthetic construct
  source 1..20: mol_type = other DNA
tcaccattcgcctcccgtag

SEQ ID NO: 1899 - DNA, 20 bp, synthetic construct
  misc_feature 1..20: note = Synthetic construct
  source 1..20: mol_type = other DNA
caccattcgcctcccgtagc

SEQ ID NO: 1900 - DNA, 20 bp, synthetic construct
  misc_feature 1..20: note = Synthetic construct
  source 1..20: mol_type = other DNA
accattcgcctcccgtagct

SEQ ID NO: 1901 - DNA, 20 bp, synthetic construct
  misc_feature 1..20: note = Synthetic construct
  source 1..20: mol_type = other DNA
ccattcgcctcccgtagctt

SEQ ID NO: 1902 - DNA, 20 bp, synthetic construct
  misc_feature 1..20: note = Synthetic construct
  source 1..20: mol_type = other DNA
cattcgcctcccgtagctta

SEQ ID NO: 1903 - DNA, 20 bp, synthetic construct
  misc_feature 1..20: note = Synthetic construct
  source 1..20: mol_type = other DNA
attcgcctcccgtagcttag

SEQ ID NO: 1904 - DNA, 20 bp, synthetic construct
  misc_feature 1..20: note = Synthetic construct
  source 1..20: mol_type = other DNA
ttcgcctcccgtagcttagc

SEQ ID NO: 1905 - DNA, 20 bp, synthetic construct
  misc_feature 1..20: note = Synthetic construct
  source 1..20: mol_type = other DNA
tcgcctcccgtagcttagcg

SEQ ID NO: 1906 - DNA, 20 bp, synthetic construct
  misc_feature 1..20: note = Synthetic construct
  source 1..20: mol_type = other DNA
cgcctcccgtagcttagcga

SEQ ID NO: 1907 - DNA, 20 bp, synthetic construct
  misc_feature 1..20: note = Synthetic construct
  source 1..20: mol_type = other DNA
gcctcccgtagcttagcgat

SEQ ID NO: 1908 - DNA, 20 bp, synthetic construct
  misc_feature 1..20: note = Synthetic construct
  source 1..20: mol_type = other DNA
cctcccgtagcttagcgata

SEQ ID NO: 1909 - DNA, 20 bp, synthetic construct
  misc_feature 1..20: note = Synthetic construct
  source 1..20: mol_type = other DNA
ctcccgtagcttagcgatag

SEQ ID NO: 1910 - DNA, 20 bp, synthetic construct
  misc_feature 1..20: note = Synthetic construct
  source 1..20: mol_type = other DNA
tcccgtagcttagcgatagc

SEQ ID NO: 1911 - DNA, 20 bp, synthetic construct
  misc_feature 1..20: note = Synthetic construct
  source 1..20: mol_type = other DNA
cccgtagcttagcgatagct

SEQ ID NO: 1912 - DNA, 20 bp, synthetic construct
  misc_feature 1..20: note = Synthetic construct
  source 1..20: mol_type = other DNA
ccgtagcttagcgatagcta

SEQ ID NO: 1913 - DNA, 20 bp, synthetic construct
  misc_feature 1..20: note = Synthetic construct
  source 1..20: mol_type = other DNA
cgtagcttagcgatagctaa

SEQ ID NO: 1914 - DNA, 20 bp, synthetic construct
  misc_feature 1..20: note = Synthetic construct
  source 1..20: mol_type = other DNA
gtagcttagcgatagctaag

SEQ ID NO: 1915 - DNA, 20 bp, synthetic construct
  misc_feature 1..20: note = Synthetic construct
  source 1..20: mol_type = other DNA
tagcttagcgatagctaagg

SEQ ID NO: 1916 - DNA, 20 bp, synthetic construct
  misc_feature 1..20: note = Synthetic construct
  source 1..20: mol_type = other DNA
agcttagcgatagctaaggt

SEQ ID NO: 1917 - DNA, 20 bp, synthetic construct
  misc_feature 1..20: note = Synthetic construct
  source 1..20: mol_type = other DNA
gcttagcgatagctaaggta

SEQ ID NO: 1918 - DNA, 20 bp, synthetic construct
  misc_feature 1..20: note = Synthetic construct
  source 1..20: mol_type = other DNA
cttagcgatagctaaggtac

SEQ ID NO: 1919 - DNA, 20 bp, synthetic construct
  misc_feature 1..20: note = Synthetic construct
  source 1..20: mol_type = other DNA
ttagcgatagctaaggtacg

SEQ ID NO: 1920 - DNA, 20 bp, synthetic construct
  misc_feature 1..20: note = Synthetic construct
  source 1..20: mol_type = other DNA
tagcgatagctaaggtacga

SEQ ID NO: 1921 - DNA, 20 bp, synthetic construct
  misc_feature 1..20: note = Synthetic construct
  source 1..20: mol_type = other DNA
agcgatagctaaggtacgac

SEQ ID NO: 1922 - DNA, 20 bp, synthetic construct
  misc_feature 1..20: note = Synthetic construct
  source 1..20: mol_type = other DNA
gcgatagctaaggtacgacg

SEQ ID NO: 1923 - DNA, 20 bp, synthetic construct
  misc_feature 1..20: note = Synthetic construct
  source 1..20: mol_type = other DNA
cgatagctaaggtacgacgg

SEQ ID NO: 1924 - DNA, 20 bp, synthetic construct
  misc_feature 1..20: note = Synthetic construct
  source 1..20: mol_type = other DNA
gatagctaaggtacgacggg

SEQ ID NO: 1925 - DNA, 20 bp, synthetic construct
  misc_feature 1..20: note = Synthetic construct
  source 1..20: mol_type = other DNA
atagctaaggtacgacgggt

SEQ ID NO: 1926 - DNA, 20 bp, synthetic construct
  misc_feature 1..20: note = Synthetic construct
  source 1..20: mol_type = other DNA
tagctaaggtacgacgggtc

SEQ ID NO: 1927 - DNA, 20 bp, synthetic construct
  misc_feature 1..20: note = Synthetic construct
  source 1..20: mol_type = other DNA
agctaaggtacgacgggtcg

SEQ ID NO: 1928 - DNA, 20 bp, synthetic construct
  misc_feature 1..20: note = Synthetic construct
  source 1..20: mol_type = other DNA
gctaaggtacgacgggtcgc

SEQ ID NO: 1929 - DNA, 20 bp, synthetic construct
  misc_feature 1..20: note = Synthetic construct
  source 1..20: mol_type = other DNA
ctaaggtacgacgggtcgcc

SEQ ID NO: 1930 - DNA, 20 bp, synthetic construct
  misc_feature 1..20: note = Synthetic construct
  source 1..20: mol_type = other DNA
taaggtacgacgggtcgcct

SEQ ID NO: 1931 - DNA, 20 bp, synthetic construct
  misc_feature 1..20: note = Synthetic construct
  source 1..20: mol_type = other DNA
aaggtacgacgggtcgcctc

SEQ ID NO: 1932 - DNA, 20 bp, synthetic construct
  misc_feature 1..20: note = Synthetic construct
  source 1..20: mol_type = other DNA
aggtacgacgggtcgcctcg

SEQ ID NO: 1933 - DNA, 20 bp, synthetic construct
  misc_feature 1..20: note = Synthetic construct
  source 1..20: mol_type = other DNA
ggtacgacgggtcgcctcgt

SEQ ID NO: 1934 - DNA, 20 bp, synthetic construct
  misc_feature 1..20: note = Synthetic construct
  source 1..20: mol_type = other DNA
gtacgacgggtcgcctcgtc

SEQ ID NO: 1935 - DNA, 20 bp, synthetic construct
  misc_feature 1..20: note = Synthetic construct
  source 1..20: mol_type = other DNA
tacgacgggtcgcctcgtca

SEQ ID NO: 1936 - DNA, 20 bp, synthetic construct
  misc_feature 1..20: note = Synthetic construct
  source 1..20: mol_type = other DNA
acgacgggtcgcctcgtcat

SEQ ID NO: 1937 - DNA, 20 bp, synthetic construct
  misc_feature 1..20: note = Synthetic construct
  source 1..20: mol_type = other DNA
cgacgggtcgcctcgtcatt

SEQ ID NO: 1938 - DNA, 20 bp, synthetic construct
  misc_feature 1..20: note = Synthetic construct
  source 1..20: mol_type = other DNA
gacgggtcgcctcgtcatta

SEQ ID NO: 1939 - DNA, 20 bp, synthetic construct
  misc_feature 1..20: note = Synthetic construct
  source 1..20: mol_type = other DNA
acgggtcgcctcgtcattac

SEQ ID NO: 1940 - DNA, 20 bp, synthetic construct
  misc_feature 1..20: note = Synthetic construct
  source 1..20: mol_type = other DNA
cgggtcgcctcgtcattacc

SEQ ID NO: 1941 - DNA, 20 bp, synthetic construct
  misc_feature 1..20: note = Synthetic construct
  source 1..20: mol_type = other DNA
gggtcgcctcgtcattacca

SEQ ID NO: 1942 - DNA, 20 bp, synthetic construct
  misc_feature 1..20: note = Synthetic construct
  source 1..20: mol_type = other DNA
ggtcgcctcgtcattaccag

SEQ ID NO: 1943 - DNA, 20 bp, synthetic construct
  misc_feature 1..20: note = Synthetic construct
  source 1..20: mol_type = other DNA
gtcgcctcgtcattaccaga

SEQ ID NO: 1944 - DNA, 20 bp, synthetic construct
  misc_feature 1..20: note = Synthetic construct
  source 1..20: mol_type = other DNA
tcgcctcgtcattaccagaa

SEQ ID NO: 1945 - DNA, 20 bp, synthetic construct
  misc_feature 1..20: note = Synthetic construct
  source 1..20: mol_type = other DNA
cgcctcgtcattaccagaac

SEQ ID NO: 1946 - DNA, 20 bp, synthetic construct
  misc_feature 1..20: note = Synthetic construct
  source 1..20: mol_type = other DNA
gcctcgtcattaccagaacc

SEQ ID NO: 1947 - DNA, 20 bp, synthetic construct
  misc_feature 1..20: note = Synthetic construct
  source 1..20: mol_type = other DNA
cctcgtcattaccagaacct

SEQ ID NO: 1948 - DNA, 20 bp, synthetic construct
  misc_feature 1..20: note = Synthetic construct
  source 1..20: mol_type = other DNA
ctcgtcattaccagaaccta

SEQ ID NO: 1949 - DNA, 20 bp, synthetic construct
  misc_feature 1..20: note = Synthetic construct
  source 1..20: mol_type = other DNA
tcgtcattaccagaacctaa

SEQ ID NO: 1950 - DNA, 20 bp, synthetic construct
  misc_feature 1..20: note = Synthetic construct
  source 1..20: mol_type = other DNA
cgtcattaccagaacctaag

SEQ ID NO: 1951 - DNA, 20 bp, synthetic construct
  misc_feature 1..20: note = Synthetic construct
  source 1..20: mol_type = other DNA
gtcattaccagaacctaagg

SEQ ID NO: 1952 - DNA, 20 bp, synthetic construct
  misc_feature 1..20: note = Synthetic construct
  source 1..20: mol_type = other DNA
tcattaccagaacctaaggt

SEQ ID NO: 1953 - DNA, 20 bp, synthetic construct
  misc_feature 1..20: note = Synthetic construct
  source 1..20: mol_type = other DNA
cattaccagaacctaaggtc

SEQ ID NO: 1954 - DNA, 20 bp, synthetic construct
  misc_feature 1..20: note = Synthetic construct
  source 1..20: mol_type = other DNA
attaccagaacctaaggtcg

SEQ ID NO: 1955 - DNA, 20 bp, synthetic construct
  misc_feature 1..20: note = Synthetic construct
  source 1..20: mol_type = other DNA
ttaccagaacctaaggtcgg

SEQ ID NO: 1956 - DNA, 20 bp, synthetic construct
  misc_feature 1..20: note = Synthetic construct
  source 1..20: mol_type = other DNA
taccagaacctaaggtcgga

SEQ ID NO: 1957 - DNA, 20 bp, synthetic construct
  misc_feature 1..20: note = Synthetic construct
  source 1..20: mol_type = other DNA
accagaacctaaggtcggat

SEQ ID NO: 1958 - DNA, 20 bp, synthetic construct
  misc_feature 1..20: note = Synthetic construct
  source 1..20: mol_type = other DNA
ccagaacctaaggtcggatg

SEQ ID NO: 1959 - DNA, 20 bp, synthetic construct
  misc_feature 1..20: note = Synthetic construct
  source 1..20: mol_type = other DNA
cagaacctaaggtcggatgc

SEQ ID NO: 1960 - DNA, 20 bp, synthetic construct
  misc_feature 1..20: note = Synthetic construct
  source 1..20: mol_type = other DNA
agaacctaaggtcggatgct

SEQ ID NO: 1961 - DNA, 20 bp, synthetic construct
  misc_feature 1..20: note = Synthetic construct
  source 1..20: mol_type = other DNA
gaacctaaggtcggatgctt

SEQ ID NO: 1962 - DNA, 20 bp, synthetic construct
  misc_feature 1..20: note = Synthetic construct
  source 1..20: mol_type = other DNA
aacctaaggtcggatgcttt

SEQ ID NO: 1963 - DNA, 20 bp, synthetic construct
  misc_feature 1..20: note = Synthetic construct
  source 1..20: mol_type = other DNA
acctaaggtcggatgctttg

SEQ ID NO: 1964 - DNA, 20 bp, synthetic construct
  misc_feature 1..20: note = Synthetic construct
  source 1..20: mol_type = other DNA
cctaaggtcggatgctttgt

SEQ ID NO: 1965 - DNA, 20 bp, synthetic construct
  misc_feature 1..20: note = Synthetic construct
  source 1..20: mol_type = other DNA
ctaaggtcggatgctttgtg

SEQ ID NO: 1966 - DNA, 20 bp, synthetic construct
  misc_feature 1..20: note = Synthetic construct
  source 1..20: mol_type = other DNA
taaggtcggatgctttgtga

SEQ ID NO: 1967 - DNA, 20 bp, synthetic construct
  misc_feature 1..20: note = Synthetic construct
  source 1..20: mol_type = other DNA
aaggtcggatgctttgtgag

SEQ ID NO: 1968 - DNA, 20 bp, synthetic construct
  misc_feature 1..20: note = Synthetic construct
  source 1..20: mol_type = other DNA
aggtcggatgctttgtgagc

SEQ ID NO: 1969 - DNA, 20 bp, synthetic construct
  misc_feature 1..20: note = Synthetic construct
  source 1..20: mol_type = other DNA
ggtcggatgctttgtgagca

SEQ ID NO: 1970 - DNA, 20 bp, synthetic construct
  misc_feature 1..20: note = Synthetic construct
  source 1..20: mol_type = other DNA
gtcggatgctttgtgagcaa

SEQ ID NO: 1971 - DNA, 20 bp, synthetic construct
  misc_feature 1..20: note = Synthetic construct
  source 1..20: mol_type = other DNA
tcggatgctttgtgagcaat

SEQ ID NO: 1972 - DNA, 20 bp, synthetic construct
  misc_feature 1..20: note = Synthetic construct
  source 1..20: mol_type = other DNA
cggatgctttgtgagcaatt

SEQ ID NO: 1973 - DNA, 20 bp, synthetic construct
  misc_feature 1..20: note = Synthetic construct
  source 1..20: mol_type = other DNA
ggatgctttgtgagcaattc

SEQ ID NO: 1974 - DNA, 20 bp, synthetic construct
  misc_feature 1..20: note = Synthetic construct
  source 1..20: mol_type = other DNA
gatgctttgtgagcaattcg

SEQ ID NO: 1975 - DNA, 20 bp, synthetic construct
  misc_feature 1..20: note = Synthetic construct
  source 1..20: mol_type = other DNA
atgctttgtgagcaattcgt

SEQ ID NO: 1976 - DNA, 20 bp, synthetic construct
  misc_feature 1..20: note = Synthetic construct
  source 1..20: mol_type = other DNA
tgctttgtgagcaattcgtc

SEQ ID NO: 1977 - DNA, 20 bp, synthetic construct
  misc_feature 1..20: note = Synthetic construct
  source 1..20: mol_type = other DNA
gctttgtgagcaattcgtcc

SEQ ID NO: 1978 - DNA, 20 bp, synthetic construct
  misc_feature 1..20: note = Synthetic construct
  source 1..20: mol_type = other DNA
ctttgtgagcaattcgtccc

SEQ ID NO: 1979 - DNA, 20 bp, synthetic construct
  misc_feature 1..20: note = Synthetic construct
  source 1..20: mol_type = other DNA
tttgtgagcaattcgtccct

SEQ ID NO: 1980 - DNA, 20 bp, synthetic construct
  misc_feature 1..20: note = Synthetic construct
  source 1..20: mol_type = other DNA
ttgtgagcaattcgtccctt

SEQ ID NO: 1981 - DNA, 20 bp, synthetic construct
  misc_feature 1..20: note = Synthetic construct
  source 1..20: mol_type = other DNA
tgtgagcaattcgtccctta

SEQ ID NO: 1982 - DNA, 20 bp, synthetic construct
  misc_feature 1..20: note = Synthetic construct
  source 1..20: mol_type = other DNA
gtgagcaattcgtcccttaa

SEQ ID NO: 1983 - DNA, 20 bp, synthetic construct
  misc_feature 1..20: note = Synthetic construct
  source 1..20: mol_type = other DNA
tgagcaattcgtcccttaag

SEQ ID NO: 1984 - DNA, 20 bp, synthetic construct
  misc_feature 1..20: note = Synthetic construct
  source 1..20: mol_type = other DNA
gagcaattcgtcccttaagt

SEQ ID NO: 1985 - DNA, 20 bp, synthetic construct
  misc_feature 1..20: note = Synthetic construct
  source 1..20: mol_type = other DNA
agcaattcgtcccttaagta

SEQ ID NO: 1986 - DNA, 20 bp, synthetic construct
  misc_feature 1..20: note = Synthetic construct
  source 1..20: mol_type = other DNA
gcaattcgtcccttaagtaa

SEQ ID NO: 1987 - DNA, 20 bp, synthetic construct
  misc_feature 1..20: note = Synthetic construct
  source 1..20: mol_type = other DNA
caattcgtcccttaagtaag

SEQ ID NO: 1988 - DNA, 20 bp, synthetic construct
  misc_feature 1..20: note = Synthetic construct
  source 1..20: mol_type = other DNA
aattcgtcccttaagtaagc

SEQ ID NO: 1989 - DNA, 20 bp, synthetic construct
  misc_feature 1..20: note = Synthetic construct
  source 1..20: mol_type = other DNA
attcgtcccttaagtaagca

SEQ ID NO: 1990 - DNA, 20 bp, synthetic construct
  misc_feature 1..20: note = Synthetic construct
  source 1..20: mol_type = other DNA
ttcgtcccttaagtaagcaa

SEQ ID NO: 1991 - DNA, 20 bp, synthetic construct
  misc_feature 1..20: note = Synthetic construct
  source 1..20: mol_type = other DNA
tcgtcccttaagtaagcaat

SEQ ID NO: 1992 - DNA, 20 bp, synthetic construct
  misc_feature 1..20: note = Synthetic construct
  source 1..20: mol_type = other DNA
cgtcccttaagtaagcaatt

SEQ ID NO: 1993 - DNA, 20 bp, synthetic construct
  misc_feature 1..20: note = Synthetic construct
  source 1..20: mol_type = other DNA
gtcccttaagtaagcaattg

SEQ ID NO: 1994 - DNA, 20 bp, synthetic construct
  misc_feature 1..20: note = Synthetic construct
  source 1..20: mol_type = other DNA
tcccttaagtaagcaattgc

SEQ ID NO: 1995 - DNA, 20 bp, synthetic construct
  misc_feature 1..20: note = Synthetic construct
  source 1..20: mol_type = other DNA
cccttaagtaagcaattgct

SEQ ID NO: 1996 - DNA, 20 bp, synthetic construct
  misc_feature 1..20: note = Synthetic construct
  source 1..20: mol_type = other DNA
ccttaagtaagcaattgctg

SEQ ID NO: 1997 - DNA, 20 bp, synthetic construct
  misc_feature 1..20: note = Synthetic construct
  source 1..20: mol_type = other DNA
cttaagtaagcaattgctgt

SEQ ID NO: 1998 - DNA, 20 bp, synthetic construct
  misc_feature 1..20: note = Synthetic construct
  source 1..20: mol_type = other DNA
ttaagtaagcaattgctgta

SEQ ID NO: 1999 - DNA, 20 bp, synthetic construct
  misc_feature 1..20: note = Synthetic construct
  source 1..20: mol_type = other DNA
taagtaagcaattgctgtaa

SEQ ID NO: 2000 - DNA, 20 bp, synthetic construct
  misc_feature 1..20: note = Synthetic construct
  source 1..20: mol_type = other DNA
aagtaagcaattgctgtaaa

SEQ ID NO: 2001 - DNA, 20 bp, synthetic construct
  misc_feature 1..20: note = Synthetic construct
  source 1..20: mol_type = other DNA
agtaagcaattgctgtaaag

SEQ ID NO: 2002 - DNA, 20 bp, synthetic construct
  misc_feature 1..20: note = Synthetic construct
  source 1..20: mol_type = other DNA
gtaagcaattgctgtaaagt

SEQ ID NO: 2003 - DNA, 20 bp, synthetic construct
  misc_feature 1..20: note = Synthetic construct
  source 1..20: mol_type = other DNA
taagcaattgctgtaaagtc

SEQ ID NO: 2004 - DNA, 20 bp, synthetic construct
  misc_feature 1..20: note = Synthetic construct
  source 1..20: mol_type = other DNA
aagcaattgctgtaaagtcg

SEQ ID NO: 2005 - DNA, 20 bp, synthetic construct
  misc_feature 1..20: note = Synthetic construct
  source 1..20: mol_type = other DNA
agcaattgctgtaaagtcgt

SEQ ID NO: 2006 - DNA, 20 bp, synthetic construct
  misc_feature 1..20: note = Synthetic construct
  source 1..20: mol_type = other DNA
gcaattgctgtaaagtcgtc

SEQ ID NO: 2007 - DNA, 20 bp, synthetic construct
  misc_feature 1..20: note = Synthetic construct
  source 1..20: mol_type = other DNA
caattgctgtaaagtcgtca

SEQ ID NO: 2008 - DNA, 20 bp, synthetic construct
  misc_feature 1..20: note = Synthetic construct
  source 1..20: mol_type = other DNA
aattgctgtaaagtcgtcac

SEQ ID NO: 2009 - DNA, 20 bp, synthetic construct
  misc_feature 1..20: note = Synthetic construct
  source 1..20: mol_type = other DNA
attgctgtaaagtcgtcact

SEQ ID NO: 2010 - DNA, 20 bp, synthetic construct
  misc_feature 1..20: note = Synthetic construct
  source 1..20: mol_type = other DNA
ttgctgtaaagtcgtcactg

SEQ ID NO: 2011 - DNA, 20 bp, synthetic construct
  misc_feature 1..20: note = Synthetic construct
  source 1..20: mol_type = other DNA
tgctgtaaagtcgtcactgt

SEQ ID NO: 2012 - DNA, 20 bp, synthetic construct
  misc_feature 1..20: note = Synthetic construct
  source 1..20: mol_type = other DNA
gctgtaaagtcgtcactgtg

SEQ ID NO: 2013 - DNA, 20 bp, synthetic construct
  misc_feature 1..20: note = Synthetic construct
  source 1..20: mol_type = other DNA
ctgtaaagtcgtcactgtgc

SEQ ID NO: 2014 - DNA, 20 bp, synthetic construct
  misc_feature 1..20: note = Synthetic construct
  source 1..20: mol_type = other DNA
tgtaaagtcgtcactgtgcg

SEQ ID NO: 2015 - DNA, 20 bp, synthetic construct
  misc_feature 1..20: note = Synthetic construct
  source 1..20: mol_type = other DNA
gtaaagtcgtcactgtgcgg

SEQ ID NO: 2016 - DNA, 20 bp, synthetic construct
  misc_feature 1..20: note = Synthetic construct
  source 1..20: mol_type = other DNA
taaagtcgtcactgtgcgga

SEQ ID NO: 2017 - DNA, 20 bp, synthetic construct
  misc_feature 1..20: note = Synthetic construct
  source 1..20: mol_type = other DNA
aaagtcgtcactgtgcggat

SEQ ID NO: 2018 - DNA, 20 bp, synthetic construct
  misc_feature 1..20: note = Synthetic construct
  source 1..20: mol_type = other DNA
aagtcgtcactgtgcggatc

SEQ ID NO: 2019 - DNA, 20 bp, synthetic construct
  misc_feature 1..20: note = Synthetic construct
  source 1..20: mol_type = other DNA
agtcgtcactgtgcggatca

SEQ ID NO: 2020 - DNA, 20 bp, synthetic construct
  misc_feature 1..20: note = Synthetic construct
  source 1..20: mol_type = other DNA
gtcgtcactgtgcggatcac

SEQ ID NO: 2021 - DNA, 20 bp, synthetic construct
  misc_feature 1..20: note = Synthetic construct
  source 1..20: mol_type = other DNA
tcgtcactgtgcggatcacc

SEQ ID NO: 2022 - DNA, 20 bp, synthetic construct
  misc_feature 1..20: note = Synthetic construct
  source 1..20: mol_type = other DNA
cgtcactgtgcggatcaccg

SEQ ID NO: 2023 - DNA, 20 bp, synthetic construct
  misc_feature 1..20: note = Synthetic construct
  source 1..20: mol_type = other DNA
gtcactgtgcggatcaccgc

SEQ ID NO: 2024 - DNA, 20 bp, synthetic construct
  misc_feature 1..20: note = Synthetic construct
  source 1..20: mol_type = other DNA
tcactgtgcggatcaccgct

SEQ ID NO: 2025 - DNA, 20 bp, synthetic construct
  misc_feature 1..20: note = Synthetic construct
  source 1..20: mol_type = other DNA
cactgtgcggatcaccgctt

SEQ ID NO: 2026 - DNA, 20 bp, synthetic construct
  misc_feature 1..20: note = Synthetic construct
  source 1..20: mol_type = other DNA
actgtgcggatcaccgcttc

SEQ ID NO: 2027 - DNA, 20 bp, synthetic construct
  misc_feature 1..20: note = Synthetic construct
  source 1..20: mol_type = other DNA
ctgtgcggatcaccgcttcc

SEQ ID NO: 2028 - DNA, 20 bp, synthetic construct
  misc_feature 1..20: note = Synthetic construct
  source 1..20: mol_type = other DNA
tgtgcggatcaccgcttcca

SEQ ID NO: 2029 - DNA, 20 bp, synthetic construct
  misc_feature 1..20: note = Synthetic construct
  source 1..20: mol_type = other DNA
gtgcggatcaccgcttccag

SEQ ID NO: 2030 - DNA, 20 bp, synthetic construct
  misc_feature 1..20: note = Synthetic construct
  source 1..20: mol_type = other DNA
tgcggatcaccgcttccagt

SEQ ID NO: 2031 - DNA, 20 bp, synthetic construct
  misc_feature 1..20: note = Synthetic construct
  source 1..20: mol_type = other DNA
gcggatcaccgcttccagta

SEQ ID NO: 2032 - DNA, 20 bp, synthetic construct
  misc_feature 1..20: note = Synthetic construct
  source 1..20: mol_type = other DNA
cggatcaccgcttccagtag

SEQ ID NO: 2033 - DNA, 20 bp, synthetic construct
  misc_feature 1..20: note = Synthetic construct
  source 1..20: mol_type = other DNA
ggatcaccgcttccagtagc

SEQ ID NO: 2034 - DNA, 20 bp, synthetic construct
  misc_feature 1..20: note = Synthetic construct
  source 1..20: mol_type = other DNA
gatcaccgcttccagtagcg

SEQ ID NO: 2035 - DNA, 20 bp, synthetic construct
  misc_feature 1..20: note = Synthetic construct
  source 1..20: mol_type = other DNA
atcaccgcttccagtagcga

SEQ ID NO: 2036 - DNA, 20 bp, synthetic construct
  misc_feature 1..20: note = Synthetic construct
  source 1..20: mol_type = other DNA
tcaccgcttccagtagcgac

SEQ ID NO: 2037 - DNA, 20 bp, synthetic construct
  misc_feature 1..20: note = Synthetic construct
  source 1..20: mol_type = other DNA
caccgcttccagtagcgaca

SEQ ID NO: 2038 - DNA, 20 bp, synthetic construct
  misc_feature 1..20: note = Synthetic construct
  source 1..20: mol_type = other DNA
accgcttccagtagcgacag

SEQ ID NO: 2039 - DNA, 20 bp, synthetic construct
  misc_feature 1..20: note = Synthetic construct
  source 1..20: mol_type = other DNA
ccgcttccagtagcgacaga

SEQ ID NO: 2040 - DNA, 20 bp, synthetic construct
  misc_feature 1..20: note = Synthetic construct
  source 1..20: mol_type = other DNA
cgcttccagtagcgacagaa

SEQ ID NO: 2041 - DNA, 20 bp, synthetic construct
  misc_feature 1..20: note = Synthetic construct
  source 1..20: mol_type = other DNA
gcttccagtagcgacagaag

SEQ ID NO: 2042 - DNA, 20 bp, synthetic construct
  misc_feature 1..20: note = Synthetic construct
  source 1..20: mol_type = other DNA
cttccagtagcgacagaagc

SEQ ID NO: 2043 - DNA, 20 bp, synthetic construct
  misc_feature 1..20: note = Synthetic construct
  source 1..20: mol_type = other DNA
ttccagtagcgacagaagca

SEQ ID NO: 2044 - DNA, 20 bp, synthetic construct
  misc_feature 1..20: note = Synthetic construct
  source 1..20: mol_type = other DNA
tccagtagcgacagaagcaa

SEQ ID NO: 2045 - DNA, 20 bp, synthetic construct
  misc_feature 1..20: note = Synthetic construct
  source 1..20: mol_type = other DNA
ccagtagcgacagaagcaat

SEQ ID NO: 2046 - DNA, 20 bp, synthetic construct
  misc_feature 1..20: note = Synthetic construct
  source 1..20: mol_type = other DNA
cagtagcgacagaagcaatt

SEQ ID NO: 2047 - DNA, 20 bp, synthetic construct
  misc_feature 1..20: note = Synthetic construct
  source 1..20: mol_type = other DNA
agtagcgacagaagcaattg

SEQ ID NO: 2048 - DNA, 20 bp, synthetic construct
  misc_feature 1..20: note = Synthetic construct
  source 1..20: mol_type = other DNA
gtagcgacagaagcaattga

SEQ ID NO: 2049 - DNA, 20 bp, synthetic construct
  misc_feature 1..20: note = Synthetic construct
  source 1..20: mol_type = other DNA
tagcgacagaagcaattgat

SEQ ID NO: 2050 - DNA, 20 bp, synthetic construct
  misc_feature 1..20: note = Synthetic construct
  source 1..20: mol_type = other DNA
agcgacagaagcaattgatt

SEQ ID NO: 2051 - DNA, 20 bp, synthetic construct
  misc_feature 1..20: note = Synthetic construct
  source 1..20: mol_type = other DNA
gcgacagaagcaattgattg

SEQ ID NO: 2052 - DNA, 20 bp, synthetic construct
  misc_feature 1..20: note = Synthetic construct
  source 1..20: mol_type = other DNA
cgacagaagcaattgattgg

SEQ ID NO: 2053 - DNA, 20 bp, synthetic construct
  misc_feature 1..20: note = Synthetic construct
  source 1..20: mol_type = other DNA
gacagaagcaattgattggt

SEQ ID NO: 2054 - DNA, 20 bp, synthetic construct
  misc_feature 1..20: note = Synthetic construct
  source 1..20: mol_type = other DNA
acagaagcaattgattggta

SEQ ID NO: 2055 - DNA, 20 bp, synthetic construct
  misc_feature 1..20: note = Synthetic construct
  source 1..20: mol_type = other DNA
cagaagcaattgattggtaa

SEQ ID NO: 2056 - DNA, 20 bp, synthetic construct
  misc_feature 1..20: note = Synthetic construct
  source 1..20: mol_type = other DNA
agaagcaattgattggtaaa

SEQ ID NO: 2057 - DNA, 20 bp, synthetic construct
  misc_feature 1..20: note = Synthetic construct
  source 1..20: mol_type = other DNA
gaagcaattgattggtaaat

SEQ ID NO: 2058 - DNA, 20 bp, synthetic construct
  misc_feature 1..20: note = Synthetic construct
  source 1..20: mol_type = other DNA
aagcaattgattggtaaatt

SEQ ID NO: 2059 - DNA, 20 bp, synthetic construct
  misc_feature 1..20: note = Synthetic construct
  source 1..20: mol_type = other DNA
agcaattgattggtaaattt

SEQ ID NO: 2060 - DNA, 20 bp, synthetic construct
  misc_feature 1..20: note = Synthetic construct
  source 1..20: mol_type = other DNA
gcaattgattggtaaatttc

SEQ ID NO: 2061 - DNA, 20 bp, synthetic construct
  misc_feature 1..20: note = Synthetic construct
  source 1..20: mol_type = other DNA
caattgattggtaaatttcg

SEQ ID NO: 2062 - DNA, 20 bp, synthetic construct
  misc_feature 1..20: note = Synthetic construct
  source 1..20: mol_type = other DNA
aattgattggtaaatttcga

SEQ ID NO: 2063 - DNA, 20 bp, synthetic construct
  misc_feature 1..20: note = Synthetic construct
  source 1..20: mol_type = other DNA
attgattggtaaatttcgag

SEQ ID NO: 2064 - DNA, 20 bp, synthetic construct
  misc_feature 1..20: note = Synthetic construct
  source 1..20: mol_type = other DNA
ttgattggtaaatttcgaga

SEQ ID NO: 2065 - DNA, 20 bp, synthetic construct
  misc_feature 1..20: note = Synthetic construct
  source 1..20: mol_type = other DNA
tgattggtaaatttcgagag

SEQ ID NO: 2066 - DNA, 20 bp, synthetic construct
  misc_feature 1..20: note = Synthetic construct
  source 1..20: mol_type = other DNA
gattggtaaatttcgagaga

SEQ ID NO: 2067 - DNA, 20 bp, synthetic construct
  misc_feature 1..20: note = Synthetic construct
  source 1..20: mol_type = other DNA
attggtaaatttcgagagaa

SEQ ID NO: 2068 - DNA, 20 bp, synthetic construct
  misc_feature 1..20: note = Synthetic construct
  source 1..20: mol_type = other DNA
ttggtaaatttcgagagaaa

SEQ ID NO: 2069 - DNA, 20 bp, synthetic construct
  misc_feature 1..20: note = Synthetic construct
  source 1..20: mol_type = other DNA
tggtaaatttcgagagaaag

SEQ ID NO: 2070 - DNA, 20 bp, synthetic construct
  misc_feature 1..20: note = Synthetic construct
  source 1..20: mol_type = other DNA
ggtaaatttcgagagaaaga

SEQ ID NO: 2071 - DNA, 20 bp, synthetic construct
  misc_feature 1..20: note = Synthetic construct
  source 1..20: mol_type = other DNA
gtaaatttcgagagaaagat

SEQ ID NO: 2072 - DNA, 20 bp, synthetic construct
  misc_feature 1..20: note = Synthetic construct
  source 1..20: mol_type = other DNA
taaatttcgagagaaagatc

SEQ ID NO: 2073 - DNA, 20 bp, synthetic construct
  misc_feature 1..20: note = Synthetic construct
  source 1..20: mol_type = other DNA
aaatttcgagagaaagatcg

SEQ ID NO: 2074 - DNA, 20 bp, synthetic construct
  misc_feature 1..20: note = Synthetic construct
  source 1..20: mol_type = other DNA
aatttcgagagaaagatcgc

SEQ ID NO: 2075 - DNA, 20 bp, synthetic construct
  misc_feature 1..20: note = Synthetic construct
  source 1..20: mol_type = other DNA
atttcgagagaaagatcgcg

SEQ ID NO: 2076 - DNA, 20 bp, synthetic construct
  misc_feature 1..20: note = Synthetic construct
  source 1..20: mol_type = other DNA
tttcgagagaaagatcgcga

SEQ ID NO: 2077 - DNA, 20 bp, synthetic construct
  misc_feature 1..20: note = Synthetic construct
  source 1..20: mol_type = other DNA
ttcgagagaaagatcgcgag

SEQ ID NO: 2078 - DNA, 20 bp, synthetic construct
  misc_feature 1..20: note = Synthetic construct
  source 1..20: mol_type = other DNA
tcgagagaaagatcgcgagg

SEQ ID NO: 2079 - DNA, 20 bp, synthetic construct
  misc_feature 1..20: note = Synthetic construct
  source 1..20: mol_type = other DNA
cgagagaaagatcgcgagga

SEQ ID NO: 2080 - DNA, 20 bp, synthetic construct
  misc_feature 1..20: note = Synthetic construct
  source 1..20: mol_type = other DNA
gagagaaagatcgcgaggaa

SEQ ID NO: 2081 - DNA, 20 bp, synthetic construct
  misc_feature 1..20: note = Synthetic construct
  source 1..20: mol_type = other DNA
agagaaagatcgcgaggaag

SEQ ID NO: 2082 - DNA, 20 bp, synthetic construct
  misc_feature 1..20: note = Synthetic construct
  source 1..20: mol_type = other DNA
gagaaagatcgcgaggaaga

SEQ ID NO: 2083 - DNA, 20 bp, synthetic construct
  misc_feature 1..20: note = Synthetic construct
  source 1..20: mol_type = other DNA
agaaagatcgcgaggaagat

SEQ ID NO: 2084 - DNA, 20 bp, synthetic construct
  misc_feature 1..20: note = Synthetic construct
  source 1..20: mol_type = other DNA
gaaagatcgcgaggaagatc

SEQ ID NO: 2085 - DNA, 20 bp, synthetic construct
  misc_feature 1..20: note = Synthetic construct
  source 1..20: mol_type = other DNA
aaagatcgcgaggaagatca

SEQ ID NO: 2086 - DNA, 20 bp, synthetic construct
  misc_feature 1..20: note = Synthetic construct
  source 1..20: mol_type = other DNA
aagatcgcgaggaagatcaa

SEQ ID NO: 2087 - DNA, 20 bp, synthetic construct
  misc_feature 1..20: note = Synthetic construct
  source 1..20: mol_type = other DNA
agatcgcgaggaagatcaat

SEQ ID NO: 2088 - DNA, 20 bp, synthetic construct
  misc_feature 1..20: note = Synthetic construct
  source 1..20: mol_type = other DNA
gatcgcgaggaagatcaata

SEQ ID NO: 2089 - DNA, 20 bp, synthetic construct
  misc_feature 1..20: note = Synthetic construct
  source 1..20: mol_type = other DNA
atcgcgaggaagatcaatac

SEQ ID NO: 2090 - DNA, 20 bp, synthetic construct
  misc_feature 1..20: note = Synthetic construct
  source 1..20: mol_type = other DNA
tcgcgaggaagatcaataca

SEQ ID NO: 2091 - DNA, 20 bp, synthetic construct
  misc_feature 1..20: note = Synthetic construct
  source 1..20: mol_type = other DNA
cgcgaggaagatcaatacat

SEQ ID NO: 2092 - DNA, 20 bp, synthetic construct
  misc_feature 1..20: note = Synthetic construct
  source 1..20: mol_type = other DNA
gcgaggaagatcaatacata

SEQ ID NO: 2093 - DNA, 20 bp, synthetic construct
  misc_feature 1..20: note = Synthetic construct
  source 1..20: mol_type = other DNA
cgaggaagatcaatacataa

SEQ ID NO: 2094 - DNA, 20 bp, synthetic construct
  misc_feature 1..20: note = Synthetic construct
  source 1..20: mol_type = other DNA
gaggaagatcaatacataaa

SEQ ID NO: 2095 - DNA, 20 bp, synthetic construct
  misc_feature 1..20: note = Synthetic construct
  source 1..20: mol_type = other DNA
aggaagatcaatacataaag

SEQ ID NO: 2096 - DNA, 20 bp, synthetic construct
  misc_feature 1..20: note = Synthetic construct
  source 1..20: mol_type = other DNA
ggaagatcaatacataaaga

SEQ ID NO: 2097 - DNA, 20 bp, synthetic construct
  misc_feature 1..20: note = Synthetic construct
  source 1..20: mol_type = other DNA
gaagatcaatacataaagag

SEQ ID NO: 2098 - DNA, 20 bp, synthetic construct
  misc_feature 1..20: note = Synthetic construct
  source 1..20: mol_type = other DNA
aagatcaatacataaagagt

SEQ ID NO: 2099 - DNA, 20 bp, synthetic construct
  misc_feature 1..20: note = Synthetic construct
  source 1..20: mol_type = other DNA
agatcaatacataaagagtt

SEQ ID NO: 2100 - DNA, 20 bp, synthetic construct
  misc_feature 1..20: note = Synthetic construct
  source 1..20: mol_type = other DNA
gatcaatacataaagagttg

SEQ ID NO: 2101 - DNA, 20 bp, synthetic construct
  misc_feature 1..20: note = Synthetic construct
  source 1..20: mol_type = other DNA
atcaatacataaagagttga

SEQ ID NO: 2102 - DNA, 20 bp, synthetic construct
  misc_feature 1..20: note = Synthetic construct
  source 1..20: mol_type = other DNA
tcaatacataaagagttgaa

SEQ ID NO: 2103 - DNA, 20 bp, synthetic construct
  misc_feature 1..20: note = Synthetic construct
  source 1..20: mol_type = other DNA
caatacataaagagttgaac

SEQ ID NO: 2104 - DNA, 20 bp, synthetic construct
  misc_feature 1..20: note = Synthetic construct
  source 1..20: mol_type = other DNA
aatacataaagagttgaact

SEQ ID NO: 2105 - DNA, 20 bp, synthetic construct
  misc_feature 1..20: note = Synthetic construct
  source 1..20: mol_type = other DNA
atacataaagagttgaactt

SEQ ID NO: 2106 - DNA, 20 bp, synthetic construct
  misc_feature 1..20: note = Synthetic construct
  source 1..20: mol_type = other DNA
tacataaagagttgaacttc

SEQ ID NO: 2107 - DNA, 20 bp, synthetic construct
  misc_feature 1..20: note = Synthetic construct
  source 1..20: mol_type = other DNA
acataaagagttgaacttct

SEQ ID NO: 2108 - DNA, 20 bp, synthetic construct
  misc_feature 1..20: note = Synthetic construct
  source 1..20: mol_type = other DNA
cataaagagttgaacttctt

SEQ ID NO: 2109 - DNA, 20 bp, synthetic construct
  misc_feature 1..20: note = Synthetic construct
  source 1..20: mol_type = other DNA
ataaagagttgaacttcttt

SEQ ID NO: 2110 - DNA, 20 bp, synthetic construct
  misc_feature 1..20: note = Synthetic construct
  source 1..20: mol_type = other DNA
taaagagttgaacttctttg

SEQ ID NO: 2111 - DNA, 20 bp, synthetic construct
  misc_feature 1..20: note = Synthetic construct
  source 1..20: mol_type = other DNA
aaagagttgaacttctttgt

SEQ ID NO: 2112 - DNA, 20 bp, synthetic construct
  misc_feature 1..20: note = Synthetic construct
  source 1..20: mol_type = other DNA
aagagttgaacttctttgtt

SEQ ID NO: 2113 - DNA, 20 bp, synthetic construct
  misc_feature 1..20: note = Synthetic construct
  source 1..20: mol_type = other DNA
agagttgaacttctttgttg

SEQ ID NO: 2114 - DNA, 20 bp, synthetic construct
  misc_feature 1..20: note = Synthetic construct
  source 1..20: mol_type = other DNA
gagttgaacttctttgttgt

SEQ ID NO: 2115 - DNA, 20 bp, synthetic construct
  misc_feature 1..20: note = Synthetic construct
  source 1..20: mol_type = other DNA
agttgaacttctttgttgtc

SEQ ID NO: 2116 - DNA, 20 bp, synthetic construct
  misc_feature 1..20: note = Synthetic construct
  source 1..20: mol_type = other DNA
gttgaacttctttgttgtct

SEQ ID NO: 2117 - DNA, 20 bp, synthetic construct
  misc_feature 1..20: note = Synthetic construct
  source 1..20: mol_type = other DNA
ttgaacttctttgttgtctt

SEQ ID NO: 2118 - DNA, 20 bp, synthetic construct
  misc_feature 1..20: note = Synthetic construct
  source 1..20: mol_type = other DNA
tgaacttctttgttgtcttc

SEQ ID NO: 2119 - DNA, 20 bp, synthetic construct
  misc_feature 1..20: note = Synthetic construct
  source 1..20: mol_type = other DNA
gaacttctttgttgtcttcg

SEQ ID NO: 2120 - DNA, 20 bp, synthetic construct
  misc_feature 1..20: note = Synthetic construct
  source 1..20: mol_type = other DNA
aacttctttgttgtcttcga

SEQ ID NO: 2121 - DNA, 20 bp, synthetic construct
  misc_feature 1..20: note = Synthetic construct
  source 1..20: mol_type = other DNA
acttctttgttgtcttcgac

SEQ ID NO: 2122 - DNA, 20 bp, synthetic construct
  misc_feature 1..20: note = Synthetic construct
  source 1..20: mol_type = other DNA
cttctttgttgtcttcgaca

SEQ ID NO: 2123 - DNA, 20 bp, synthetic construct
  misc_feature 1..20: note = Synthetic construct
  source 1..20: mol_type = other DNA
ttctttgttgtcttcgacat

SEQ ID NO: 2124 - DNA, 20 bp, synthetic construct
  misc_feature 1..20: note = Synthetic construct
  source 1..20: mol_type = other DNA
tctttgttgtcttcgacatg

SEQ ID NO: 2125 - DNA, 20 bp, synthetic construct
  misc_feature 1..20: note = Synthetic construct
  source 1..20: mol_type = other DNA
ctttgttgtcttcgacatgg

SEQ ID NO: 2126 - DNA, 20 bp, synthetic construct
  misc_feature 1..20: note = Synthetic construct
  source 1..20: mol_type = other DNA
tttgttgtcttcgacatggg

SEQ ID NO: 2127 - DNA, 20 bp, synthetic construct
  misc_feature 1..20: note = Synthetic construct
  source 1..20: mol_type = other DNA
ttgttgtcttcgacatgggt

SEQ ID NO: 2128 - DNA, 20 bp, synthetic construct
  misc_feature 1..20: note = Synthetic construct
  source 1..20: mol_type = other DNA
tgttgtcttcgacatgggta

SEQ ID NO: 2129 - DNA, 20 bp, synthetic construct
  misc_feature 1..20: note = Synthetic construct
  source 1..20: mol_type = other DNA
gttgtcttcgacatgggtaa

SEQ ID NO: 2130 - DNA, 20 bp, synthetic construct
  misc_feature 1..20: note = Synthetic construct
  source 1..20: mol_type = other DNA
ttgtcttcgacatgggtaat

SEQ ID NO: 2131 - DNA, 20 bp, synthetic construct
  misc_feature 1..20: note = Synthetic construct
  source 1..20: mol_type = other DNA
tgtcttcgacatgggtaatc

SEQ ID NO: 2132 - DNA, 20 bp, synthetic construct
  misc_feature 1..20: note = Synthetic construct
  source 1..20: mol_type = other DNA
gtcttcgacatgggtaatcc

SEQ ID NO: 2133 - DNA, 20 bp, synthetic construct
  misc_feature 1..20: note = Synthetic construct
  source 1..20: mol_type = other DNA
tcttcgacatgggtaatcct

SEQ ID NO: 2134 - DNA, 20 bp, synthetic construct
  misc_feature 1..20: note = Synthetic construct
  source 1..20: mol_type = other DNA
cttcgacatgggtaatcctc

SEQ ID NO: 2135 - DNA, 20 bp, synthetic construct
  misc_feature 1..20: note = Synthetic construct
  source 1..20: mol_type = other DNA
ttcgacatgggtaatcctca

SEQ ID NO: 2136 - DNA, 20 bp, synthetic construct
  misc_feature 1..20: note = Synthetic construct
  source 1..20: mol_type = other DNA
tcgacatgggtaatcctcat

SEQ ID NO: 2137 - DNA, 20 bp, synthetic construct
  misc_feature 1..20: note = Synthetic construct
  source 1..20: mol_type = other DNA
cgacatgggtaatcctcatg

SEQ ID NO: 2138 - DNA, 20 bp, synthetic construct
  misc_feature 1..20: note = Synthetic construct
  source 1..20: mol_type = other DNA
gacatgggtaatcctcatgt

SEQ ID NO: 2139 - DNA, 20 bp, synthetic construct
  misc_feature 1..20: note = Synthetic construct
  source 1..20: mol_type = other DNA
acatgggtaatcctcatgtt

SEQ ID NO: 2140 - DNA, 20 bp, synthetic construct
  misc_feature 1..20: note = Synthetic construct
  source 1..20: mol_type = other DNA
catgggtaatcctcatgttt

SEQ ID NO: 2141 - DNA, 20 bp, synthetic construct
  misc_feature 1..20: note = Synthetic construct
  source 1..20: mol_type = other DNA
atgggtaatcctcatgtttg

SEQ ID NO: 2142 - DNA, 20 bp, synthetic construct
  misc_feature 1..20: note = Synthetic construct
  source 1..20: mol_type = other DNA
tgggtaatcctcatgtttga

SEQ ID NO: 2143 - DNA, 20 bp, synthetic construct
  misc_feature 1..20: note = Synthetic construct
  source 1..20: mol_type = other DNA
gggtaatcctcatgtttgaa

SEQ ID NO: 2144 - DNA, 20 bp, synthetic construct
  misc_feature 1..20: note = Synthetic construct
  source 1..20: mol_type = other DNA
ggtaatcctcatgtttgaat

SEQ ID NO: 2145 - DNA, 20 bp, synthetic construct
  misc_feature 1..20: note = Synthetic construct
  source 1..20: mol_type = other DNA
gtaatcctcatgtttgaatg

SEQ ID NO: 2146 - DNA, 20 bp, synthetic construct
  misc_feature 1..20: note = Synthetic construct
  source 1..20: mol_type = other DNA
taatcctcatgtttgaatgg

SEQ ID NO: 2147 - DNA, 20 bp, synthetic construct
  misc_feature 1..20: note = Synthetic construct
  source 1..20: mol_type = other DNA
aatcctcatgtttgaatggc

SEQ ID NO: 2148 - DNA, 20 bp, synthetic construct
  misc_feature 1..20: note = Synthetic construct
  source 1..20: mol_type = other DNA
atcctcatgtttgaatggcc

SEQ ID NO: 2149 - DNA, 20 bp, synthetic construct
  misc_feature 1..20: note = Synthetic construct
  source 1..20: mol_type = other DNA
tcctcatgtttgaatggccg

SEQ ID NO: 2150 - DNA, 20 bp, synthetic construct
  misc_feature 1..20: note = Synthetic construct
  source 1..20: mol_type = other DNA
cctcatgtttgaatggccgg

SEQ ID NO: 2151 - DNA, 20 bp, synthetic construct
  misc_feature 1..20: note = Synthetic construct
  source 1..20: mol_type = other DNA
ctcatgtttgaatggccggc

SEQ ID NO: 2152 - DNA, 20 bp, synthetic construct
  misc_feature 1..20: note = Synthetic construct
  source 1..20: mol_type = other DNA
tcatgtttgaatggccggcg

SEQ ID NO: 2153 - DNA, 20 bp, synthetic construct
  misc_feature 1..20: note = Synthetic construct
  source 1..20: mol_type = other DNA
catgtttgaatggccggcgt

SEQ ID NO: 2154 - DNA, 20 bp, synthetic construct
  misc_feature 1..20: note = Synthetic construct
  source 1..20: mol_type = other DNA
atgtttgaatggccggcgtc

SEQ ID NO: 2155 - DNA, 20 bp, synthetic construct
  misc_feature 1..20: note = Synthetic construct
  source 1..20: mol_type = other DNA
tgtttgaatggccggcgtct

SEQ ID NO: 2156 - DNA, 20 bp, synthetic construct
  misc_feature 1..20: note = Synthetic construct
  source 1..20: mol_type = other DNA
gtttgaatggccggcgtcta

SEQ ID NO: 2157 - DNA, 20 bp, synthetic construct
  misc_feature 1..20: note = Synthetic construct
  source 1..20: mol_type = other DNA
tttgaatggccggcgtctat

SEQ ID NO: 2158 - DNA, 20 bp, synthetic construct
  misc_feature 1..20: note = Synthetic construct
  source 1..20: mol_type = other DNA
ttgaatggccggcgtctatt

SEQ ID NO: 2159 - DNA, 20 bp, synthetic construct
  misc_feature 1..20: note = Synthetic construct
  source 1..20: mol_type = other DNA
tgaatggccggcgtctatta

SEQ ID NO: 2160 - DNA, 20 bp, synthetic construct
  misc_feature 1..20: note = Synthetic construct
  source 1..20: mol_type = other DNA
gaatggccggcgtctattag

SEQ ID NO: 2161 - DNA, 20 bp, synthetic construct
  misc_feature 1..20: note = Synthetic construct
  source 1..20: mol_type = other DNA
aatggccggcgtctattagt

SEQ ID NO: 2162 - DNA, 20 bp, synthetic construct
  misc_feature 1..20: note = Synthetic construct
  source 1..20: mol_type = other DNA
atggccggcgtctattagta

SEQ ID NO: 2163 - DNA, 20 bp, synthetic construct
  misc_feature 1..20: note = Synthetic construct
  source 1..20: mol_type = other DNA
tggccggcgtctattagtag

SEQ ID NO: 2164 - DNA, 20 bp, synthetic construct
  misc_feature 1..20: note = Synthetic construct
  source 1..20: mol_type = other DNA
ggccggcgtctattagtaga

SEQ ID NO: 2165 - DNA, 20 bp, synthetic construct
  misc_feature 1..20: note = Synthetic construct
  source 1..20: mol_type = other DNA
gccggcgtctattagtagat

SEQ ID NO: 2166 - DNA, 20 bp, synthetic construct
  misc_feature 1..20: note = Synthetic construct
  source 1..20: mol_type = other DNA
ccggcgtctattagtagatg

SEQ ID NO: 2167 - DNA, 20 bp, synthetic construct
  misc_feature 1..20: note = Synthetic construct
  source 1..20: mol_type = other DNA
cggcgtctattagtagatgc

SEQ ID NO: 2168 - DNA, 20 bp, synthetic construct
  misc_feature 1..20: note = Synthetic construct
  source 1..20: mol_type = other DNA
ggcgtctattagtagatgcc

SEQ ID NO: 2169 - DNA, 20 bp, synthetic construct
  misc_feature 1..20: note = Synthetic construct
  source 1..20: mol_type = other DNA
gcgtctattagtagatgccg

SEQ ID NO: 2170 - DNA, 20 bp, synthetic construct
  misc_feature 1..20: note = Synthetic construct
  source 1..20: mol_type = other DNA
cgtctattagtagatgccgg

SEQ ID NO: 2171 - DNA, 20 bp, synthetic construct
  misc_feature 1..20: note = Synthetic construct
  source 1..20: mol_type = other DNA
gtctattagtagatgccgga

SEQ ID NO: 2172 - DNA, 20 bp, synthetic construct
  misc_feature 1..20: note = Synthetic construct
  source 1..20: mol_type = other DNA
tctattagtagatgccggag

SEQ ID NO: 2173 - DNA, 20 bp, synthetic construct
  misc_feature 1..20: note = Synthetic construct
  source 1..20: mol_type = other DNA
ctattagtagatgccggagt

SEQ ID NO: 2174 - DNA, 20 bp, synthetic construct
  misc_feature 1..20: note = Synthetic construct
  source 1..20: mol_type = other DNA
tattagtagatgccggagtt

SEQ ID NO: 2175 - DNA, 20 bp, synthetic construct
  misc_feature 1..20: note = Synthetic construct
  source 1..20: mol_type = other DNA
attagtagatgccggagttt

SEQ ID NO: 2176 - DNA, 20 bp, synthetic construct
  misc_feature 1..20: note = Synthetic construct
  source 1..20: mol_type = other DNA
ttagtagatgccggagtttg

SEQ ID NO: 2177 - DNA, 20 bp, synthetic construct
  misc_feature 1..20: note = Synthetic construct
  source 1..20: mol_type = other DNA
tagtagatgccggagtttgc

SEQ ID NO: 2178 - DNA, 20 bp, synthetic construct
  misc_feature 1..20: note = Synthetic construct
  source 1..20: mol_type = other DNA
agtagatgccggagtttgct

SEQ ID NO: 2179 - DNA, 20 bp, synthetic construct
  misc_feature 1..20: note = Synthetic construct
  source 1..20: mol_type = other DNA
gtagatgccggagtttgctg

SEQ ID NO: 2180 - DNA, 20 bp, synthetic construct
  misc_feature 1..20: note = Synthetic construct
  source 1..20: mol_type = other DNA
tagatgccggagtttgctgc

SEQ ID NO: 2181 - DNA, 20 bp, synthetic construct
  misc_feature 1..20: note = Synthetic construct
  source 1..20: mol_type = other DNA
agatgccggagtttgctgcg

SEQ ID NO: 2182 - DNA, 20 bp, synthetic construct
  misc_feature 1..20: note = Synthetic construct
  source 1..20: mol_type = other DNA
gatgccggagtttgctgcga

SEQ ID NO: 2183 - DNA, 20 bp, synthetic construct
  misc_feature 1..20: note = Synthetic construct
  source 1..20: mol_type = other DNA
atgccggagtttgctgcgat

SEQ ID NO: 2184 - DNA, 20 bp, synthetic construct
  misc_feature 1..20: note = Synthetic construct
  source 1..20: mol_type = other DNA
tgccggagtttgctgcgatt

SEQ ID NO: 2185 - DNA, 20 bp, synthetic construct
  misc_feature 1..20: note = Synthetic construct
  source 1..20: mol_type = other DNA
gccggagtttgctgcgattg

SEQ ID NO: 2186 - DNA, 20 bp, synthetic construct
  misc_feature 1..20: note = Synthetic construct
  source 1..20: mol_type = other DNA
ccggagtttgctgcgattgc

SEQ ID NO: 2187 - DNA, 20 bp, synthetic construct
  misc_feature 1..20: note = Synthetic construct
  source 1..20: mol_type = other DNA
cggagtttgctgcgattgct

SEQ ID NO: 2188 - DNA, 20 bp, synthetic construct
  misc_feature 1..20: note = Synthetic construct
  source 1..20: mol_type = other DNA
ggagtttgctgcgattgctg

SEQ ID NO: 2189 - DNA, 20 bp, synthetic construct
  misc_feature 1..20: note = Synthetic construct
  source 1..20: mol_type = other DNA
gagtttgctgcgattgctga

SEQ ID NO: 2190 - DNA, 20 bp, synthetic construct
  misc_feature 1..20: note = Synthetic construct
  source 1..20: mol_type = other DNA
agtttgctgcgattgctgag

SEQ ID NO: 2191 - DNA, 20 bp, synthetic construct
  misc_feature 1..20: note = Synthetic construct
  source 1..20: mol_type = other DNA
gtttgctgcgattgctgagg

SEQ ID NO: 2192 - DNA, 20 bp, synthetic construct
  misc_feature 1..20: note = Synthetic construct
  source 1..20: mol_type = other DNA
tttgctgcgattgctgaggg

SEQ ID NO: 2193 - DNA, 20 bp, synthetic construct
  misc_feature 1..20: note = Synthetic construct
  source 1..20: mol_type = other DNA
ttgctgcgattgctgaggga

SEQ ID NO: 2194 - DNA, 20 bp, synthetic construct
  misc_feature 1..20: note = Synthetic construct
  source 1..20: mol_type = other DNA
tgctgcgattgctgagggaa

SEQ ID NO: 2195 - DNA, 20 bp, synthetic construct
  misc_feature 1..20: note = Synthetic construct
  source 1..20: mol_type = other DNA
gctgcgattgctgagggaat

SEQ ID NO: 2196 - DNA, 20 bp, synthetic construct
  misc_feature 1..20: note = Synthetic construct
  source 1..20: mol_type = other DNA
ctgcgattgctgagggaatc

SEQ ID NO: 2197 - DNA, 20 bp, synthetic construct
  misc_feature 1..20: note = Synthetic construct
  source 1..20: mol_type = other DNA
tgcgattgctgagggaatcg

SEQ ID NO: 2198 - DNA, 20 bp, synthetic construct
  misc_feature 1..20: note = Synthetic construct
  source 1..20: mol_type = other DNA
gcgattgctgagggaatcgg

SEQ ID NO: 2199 - DNA, 20 bp, synthetic construct
  misc_feature 1..20: note = Synthetic construct
  source 1..20: mol_type = other DNA
cgattgctgagggaatcggg

SEQ ID NO: 2200 - DNA, 20 bp, synthetic construct
  misc_feature 1..20: note = Synthetic construct
  source 1..20: mol_type = other DNA
gattgctgagggaatcgggt

SEQ ID NO: 2201 - DNA, 20 bp, synthetic construct
  misc_feature 1..20: note = Synthetic construct
  source 1..20: mol_type = other DNA
attgctgagggaatcgggtt

SEQ ID NO: 2202 - DNA, 20 bp, synthetic construct
  misc_feature 1..20: note = Synthetic construct
  source 1..20: mol_type = other DNA
ttgctgagggaatcgggttt

SEQ ID NO: 2203 - DNA, 20 bp, synthetic construct
  misc_feature 1..20: note = Synthetic construct
  source 1..20: mol_type = other DNA
tgctgagggaatcgggtttc

SEQ ID NO: 2204 - DNA, 20 bp, synthetic construct
  misc_feature 1..20: note = Synthetic construct
  source 1..20: mol_type = other DNA
gctgagggaatcgggtttcc

SEQ ID NO: 2205 - DNA, 20 bp, synthetic construct
  misc_feature 1..20: note = Synthetic construct
  source 1..20: mol_type = other DNA
ctgagggaatcgggtttcca

SEQ ID NO: 2206 - DNA, 20 bp, synthetic construct
  misc_feature 1..20: note = Synthetic construct
  source 1..20: mol_type = other DNA
tgagggaatcgggtttccat

SEQ ID NO: 2207 - DNA, 20 bp, synthetic construct
  misc_feature 1..20: note = Synthetic construct
  source 1..20: mol_type = other DNA
gagggaatcgggtttccatc

SEQ ID NO: 2208 - DNA, 20 bp, synthetic construct
  misc_feature 1..20: note = Synthetic construct
  source 1..20: mol_type = other DNA
agggaatcgggtttccatct

SEQ ID NO: 2209 - DNA, 20 bp, synthetic construct
  misc_feature 1..20: note = Synthetic construct
  source 1..20: mol_type = other DNA
gggaatcgggtttccatctt

SEQ ID NO: 2210 - DNA, 20 bp, synthetic construct
  misc_feature 1..20: note = Synthetic construct
  source 1..20: mol_type = other DNA
ggaatcgggtttccatcttt

SEQ ID NO: 2211 - DNA, 20 bp, synthetic construct
  misc_feature 1..20: note = Synthetic construct
  source 1..20: mol_type = other DNA
gaatcgggtttccatctttt

SEQ ID NO: 2212 - DNA, 20 bp, synthetic construct
  misc_feature 1..20: note = Synthetic construct
  source 1..20: mol_type = other DNA
aatcgggtttccatctttta

SEQ ID NO: 2213 - DNA, 20 bp, synthetic construct
  misc_feature 1..20: note = Synthetic construct
  source 1..20: mol_type = other DNA
atcgggtttccatcttttag

SEQ ID NO: 2214 - DNA, 20 bp, synthetic construct
  misc_feature 1..20: note = Synthetic construct
  source 1..20: mol_type = other DNA
tcgggtttccatcttttagg

SEQ ID NO: 2215 - DNA, 20 bp, synthetic construct
  misc_feature 1..20: note = Synthetic construct
  source 1..20: mol_type = other DNA
cgggtttccatcttttagga

SEQ ID NO: 2216 - DNA, 20 bp, synthetic construct
  misc_feature 1..20: note = Synthetic construct
  source 1..20: mol_type = other DNA
gggtttccatcttttaggag

SEQ ID NO: 2217 - DNA, 20 bp, synthetic construct
  misc_feature 1..20: note = Synthetic construct
  source 1..20: mol_type = other DNA
ggtttccatcttttaggaga

SEQ ID NO: 2218 - DNA, 20 bp, synthetic construct
  misc_feature 1..20: note = Synthetic construct
  source 1..20: mol_type = other DNA
gtttccatcttttaggagac

SEQ ID NO: 2219 - DNA, 20 bp, synthetic construct
  misc_feature 1..20: note = Synthetic construct
  source 1..20: mol_type = other DNA
tttccatcttttaggagacc

SEQ ID NO: 2220 - DNA, 20 bp, synthetic construct
  misc_feature 1..20: note = Synthetic construct
  source 1..20: mol_type = other DNA
ttccatcttttaggagacct

SEQ ID NO: 2221 - DNA, 20 bp, synthetic construct
  misc_feature 1..20: note = Synthetic construct
  source 1..20: mol_type = other DNA
tccatcttttaggagacctt

SEQ ID NO: 2222 - DNA, 20 bp, synthetic construct
  misc_feature 1..20: note = Synthetic construct
  source 1..20: mol_type = other DNA
ccatcttttaggagaccttg

SEQ ID NO: 2223 - DNA, 20 bp, synthetic construct
  misc_feature 1..20: note = Synthetic construct
  source 1..20: mol_type = other DNA
catcttttaggagaccttgc

SEQ ID NO: 2224 - DNA, 20 bp, synthetic construct
  misc_feature 1..20: note = Synthetic construct
  source 1..20: mol_type = other DNA
atcttttaggagaccttgca

SEQ ID NO: 2225 - DNA, 20 bp, synthetic construct
  misc_feature 1..20: note = Synthetic construct
  source 1..20: mol_type = other DNA
tcttttaggagaccttgcat

SEQ ID NO: 2226 - DNA, 20 bp, synthetic construct
  misc_feature 1..20: note = Synthetic construct
  source 1..20: mol_type = other DNA
cttttaggagaccttgcatt

SEQ ID NO: 2227 - DNA, 20 bp, synthetic construct
  misc_feature 1..20: note = Synthetic construct
  source 1..20: mol_type = other DNA
ttttaggagaccttgcattg

SEQ ID NO: 2228 - DNA, 20 bp, synthetic construct
  misc_feature 1..20: note = Synthetic construct
  source 1..20: mol_type = other DNA
tttaggagaccttgcattgc

SEQ ID NO: 2229 - DNA, 20 bp, synthetic construct
  misc_feature 1..20: note = Synthetic construct
  source 1..20: mol_type = other DNA
ttaggagaccttgcattgcc

SEQ ID NO: 2230 - DNA, 20 bp, synthetic construct
  misc_feature 1..20: note = Synthetic construct
  source 1..20: mol_type = other DNA
taggagaccttgcattgcct

SEQ ID NO: 2231 - DNA, 20 bp, synthetic construct
  misc_feature 1..20: note = Synthetic construct
  source 1..20: mol_type = other DNA
aggagaccttgcattgcctt

SEQ ID NO: 2232 - DNA, 20 bp, synthetic construct
  misc_feature 1..20: note = Synthetic construct
  source 1..20: mol_type = other DNA
ggagaccttgcattgcctta

SEQ ID NO: 2233 - DNA, 20 bp, synthetic construct
  misc_feature 1..20: note = Synthetic construct
  source 1..20: mol_type = other DNA
gagaccttgcattgccttaa

SEQ ID NO: 2234 - DNA, 20 bp, synthetic construct
  misc_feature 1..20: note = Synthetic construct
  source 1..20: mol_type = other DNA
agaccttgcattgccttaac

SEQ ID NO: 2235 - DNA, 20 bp, synthetic construct
  misc_feature 1..20: note = Synthetic construct
  source 1..20: mol_type = other DNA
gaccttgcattgccttaaca

SEQ ID NO: 2236 - DNA, 20 bp, synthetic construct
  misc_feature 1..20: note = Synthetic construct
  source 1..20: mol_type = other DNA
accttgcattgccttaacaa

SEQ ID NO: 2237 - DNA, 20 bp, synthetic construct
  misc_feature 1..20: note = Synthetic construct
  source 1..20: mol_type = other DNA
ccttgcattgccttaacaat

SEQ ID NO: 2238 - DNA, 20 bp, synthetic construct
  misc_feature 1..20: note = Synthetic construct
  source 1..20: mol_type = other DNA
cttgcattgccttaacaata

SEQ ID NO: 2239 - DNA, 20 bp, synthetic construct
  misc_feature 1..20: note = Synthetic construct
  source 1..20: mol_type = other DNA
ttgcattgccttaacaataa

SEQ ID NO: 2240 - DNA, 20 bp, synthetic construct
  misc_feature 1..20: note = Synthetic construct
  source 1..20: mol_type = other DNA
tgcattgccttaacaataag

SEQ ID NO: 2241 - DNA, 20 bp, synthetic construct
  misc_feature 1..20: note = Synthetic construct
  source 1..20: mol_type = other DNA
gcattgccttaacaataagc

SEQ ID NO: 2242 - DNA, 20 bp, synthetic construct
  misc_feature 1..20: note = Synthetic construct
  source 1..20: mol_type = other DNA
cattgccttaacaataagct

SEQ ID NO: 2243 - DNA, 20 bp, synthetic construct
  misc_feature 1..20: note = Synthetic construct
  source 1..20: mol_type = other DNA
attgccttaacaataagctc

SEQ ID NO: 2244 - DNA, 20 bp, synthetic construct
  misc_feature 1..20: note = Synthetic construct
  source 1..20: mol_type = other DNA
ttgccttaacaataagctcg

SEQ ID NO: 2245 - DNA, 20 bp, synthetic construct
  misc_feature 1..20: note = Synthetic construct
  source 1..20: mol_type = other DNA
tgccttaacaataagctcgc

SEQ ID NO: 2246 - DNA, 20 bp, synthetic construct
  misc_feature 1..20: note = Synthetic construct
  source 1..20: mol_type = other DNA
gccttaacaataagctcgca

SEQ ID NO: 2247 - DNA, 20 bp, synthetic construct
  misc_feature 1..20: note = Synthetic construct
  source 1..20: mol_type = other DNA
ccttaacaataagctcgcag

SEQ ID NO: 2248 - DNA, 20 bp, synthetic construct
  misc_feature 1..20: note = Synthetic construct
  source 1..20: mol_type = other DNA
cttaacaataagctcgcagt

SEQ ID NO: 2249 - DNA, 20 bp, synthetic construct
  misc_feature 1..20: note = Synthetic construct
  source 1..20: mol_type = other DNA
ttaacaataagctcgcagtc

SEQ ID NO: 2250 - DNA, 20 bp, synthetic construct
  misc_feature 1..20: note = Synthetic construct
  source 1..20: mol_type = other DNA
taacaataagctcgcagtcg

SEQ ID NO: 2251 - DNA, 20 bp, synthetic construct
  misc_feature 1..20: note = Synthetic construct
  source 1..20: mol_type = other DNA
aacaataagctcgcagtcgg

SEQ ID NO: 2252 - DNA, 20 bp, synthetic construct
  misc_feature 1..20: note = Synthetic construct
  source 1..20: mol_type = other DNA
acaataagctcgcagtcgga

SEQ ID NO: 2253 - DNA, 20 bp, synthetic construct
  misc_feature 1..20: note = Synthetic construct
  source 1..20: mol_type = other DNA
caataagctcgcagtcggaa

SEQ ID NO: 2254 - DNA, 20 bp, synthetic construct
  misc_feature 1..20: note = Synthetic construct
  source 1..20: mol_type = other DNA
aataagctcgcagtcggaat

SEQ ID NO: 2255 - DNA, 20 bp, synthetic construct
  misc_feature 1..20: note = Synthetic construct
  source 1..20: mol_type = other DNA
ataagctcgcagtcggaatt

SEQ ID NO: 2256 - DNA, 20 bp, synthetic construct
  misc_feature 1..20: note = Synthetic construct
  source 1..20: mol_type = other DNA
taagctcgcagtcggaattc

SEQ ID NO: 2257 - DNA, 20 bp, synthetic construct
  misc_feature 1..20: note = Synthetic construct
  source 1..20: mol_type = other DNA
aagctcgcagtcggaattcg

SEQ ID NO: 2258 - DNA, 20 bp, synthetic construct
  misc_feature 1..20: note = Synthetic construct
  source 1..20: mol_type = other DNA
agctcgcagtcggaattcgt

SEQ ID NO: 2259 - DNA, 20 bp, synthetic construct
  misc_feature 1..20: note = Synthetic construct
  source 1..20: mol_type = other DNA
gctcgcagtcggaattcgta

SEQ ID NO: 2260 - DNA, 20 bp, synthetic construct
  misc_feature 1..20: note = Synthetic construct
  source 1..20: mol_type = other DNA
ctcgcagtcggaattcgtag

SEQ ID NO: 2261 - DNA, 20 bp, synthetic construct
  misc_feature 1..20: note = Synthetic construct
  source 1..20: mol_type = other DNA
tcgcagtcggaattcgtagc

SEQ ID NO: 2262 - DNA, 20 bp, synthetic construct
  misc_feature 1..20: note = Synthetic construct
  source 1..20: mol_type = other DNA
cgcagtcggaattcgtagcg

SEQ ID NO: 2263 - DNA, 20 bp, synthetic construct
  misc_feature 1..20: note = Synthetic construct
  source 1..20: mol_type = other DNA
gcagtcggaattcgtagcga

SEQ ID NO: 2264 - DNA, 20 bp, synthetic construct
  misc_feature 1..20: note = Synthetic construct
  source 1..20: mol_type = other DNA
cagtcggaattcgtagcgaa

SEQ ID NO: 2265 - DNA, 20 bp, synthetic construct
  misc_feature 1..20: note = Synthetic construct
  source 1..20: mol_type = other DNA
agtcggaattcgtagcgaaa

SEQ ID NO: 2266 - DNA, 20 bp, synthetic construct
  misc_feature 1..20: note = Synthetic construct
  source 1..20: mol_type = other DNA
gtcggaattcgtagcgaaaa

SEQ ID NO: 2267 - DNA, 20 bp, synthetic construct
  misc_feature 1..20: note = Synthetic construct
  source 1..20: mol_type = other DNA
tcggaattcgtagcgaaaat

SEQ ID NO: 2268 - DNA, 20 bp, synthetic construct
  misc_feature 1..20: note = Synthetic construct
  source 1..20: mol_type = other DNA
cggaattcgtagcgaaaatt

SEQ ID NO: 2269 - DNA, 20 bp, synthetic construct
  misc_feature 1..20: note = Synthetic construct
  source 1..20: mol_type = other DNA
ggaattcgtagcgaaaattg

SEQ ID NO: 2270 - DNA, 20 bp, synthetic construct
  misc_feature 1..20: note = Synthetic construct
  source 1..20: mol_type = other DNA
gaattcgtagcgaaaattgg

SEQ ID NO: 2271 - DNA, 20 bp, synthetic construct
  misc_feature 1..20: note = Synthetic construct
  source 1..20: mol_type = other DNA
aattcgtagcgaaaattgga

SEQ ID NO: 2272 - DNA, 20 bp, synthetic construct
  misc_feature 1..20: note = Synthetic construct
  source 1..20: mol_type = other DNA
attcgtagcgaaaattggaa

SEQ ID NO: 2273 - DNA, 20 bp, synthetic construct
  misc_feature 1..20: note = Synthetic construct
  source 1..20: mol_type = other DNA
ttcgtagcgaaaattggaat

SEQ ID NO: 2274 - DNA, 20 bp, synthetic construct
  misc_feature 1..20: note = Synthetic construct
  source 1..20: mol_type = other DNA
tcgtagcgaaaattggaatg

SEQ ID NO: 2275 - DNA, 20 bp, synthetic construct
  misc_feature 1..20: note = Synthetic construct
  source 1..20: mol_type = other DNA
cgtagcgaaaattggaatgg

SEQ ID NO: 2276 - DNA, 20 bp, synthetic construct
  misc_feature 1..20: note = Synthetic construct
  source 1..20: mol_type = other DNA
gtagcgaaaattggaatggt

SEQ ID NO: 2277 - DNA, 20 bp, synthetic construct
  misc_feature 1..20: note = Synthetic construct
  source 1..20: mol_type = other DNA
tagcgaaaattggaatggtt

SEQ ID NO: 2278 - DNA, 20 bp, synthetic construct
  misc_feature 1..20: note = Synthetic construct
  source 1..20: mol_type = other DNA
agcgaaaattggaatggtta

SEQ ID NO: 2279 - DNA, 20 bp, synthetic construct
  misc_feature 1..20: note = Synthetic construct
  source 1..20: mol_type = other DNA
gcgaaaattggaatggttag

SEQ ID NO: 2280 - DNA, 20 bp, synthetic construct
  misc_feature 1..20: note = Synthetic construct
  source 1..20: mol_type = other DNA
cgaaaattggaatggttagt

SEQ ID NO: 2281 - DNA, 20 bp, synthetic construct
  misc_feature 1..20: note = Synthetic construct
  source 1..20: mol_type = other DNA
gaaaattggaatggttagtt

SEQ ID NO: 2282 - DNA, 20 bp, synthetic construct
  misc_feature 1..20: note = Synthetic construct
  source 1..20: mol_type = other DNA
aaaattggaatggttagttc

SEQ ID NO: 2283 - DNA, 20 bp, synthetic construct
  misc_feature 1..20: note = Synthetic construct
  source 1..20: mol_type = other DNA
aaattggaatggttagttcc

SEQ ID NO: 2284 - DNA, 20 bp, synthetic construct
  misc_feature 1..20: note = Synthetic construct
  source 1..20: mol_type = other DNA
aattggaatggttagttcca

SEQ ID NO: 2285 - DNA, 20 bp, synthetic construct
  misc_feature 1..20: note = Synthetic construct
  source 1..20: mol_type = other DNA
attggaatggttagttccat

SEQ ID NO: 2286 - DNA, 20 bp, synthetic construct
  misc_feature 1..20: note = Synthetic construct
  source 1..20: mol_type = other DNA
ttggaatggttagttccata

SEQ ID NO: 2287 - DNA, 20 bp, synthetic construct
  misc_feature 1..20: note = Synthetic construct
  source 1..20: mol_type = other DNA
tggaatggttagttccatat

SEQ ID NO: 2288 - DNA, 20 bp, synthetic construct
  misc_feature 1..20: note = Synthetic construct
  source 1..20: mol_type = other DNA
ggaatggttagttccatatt

SEQ ID NO: 2289 - DNA, 20 bp, synthetic construct
  misc_feature 1..20: note = Synthetic construct
  source 1..20: mol_type = other DNA
gaatggttagttccatattt

SEQ ID NO: 2290 - DNA, 20 bp, synthetic construct
  misc_feature 1..20: note = Synthetic construct
  source 1..20: mol_type = other DNA
aatggttagttccatattta

SEQ ID NO: 2291 - DNA, 20 bp, synthetic construct
  misc_feature 1..20: note = Synthetic construct
  source 1..20: mol_type = other DNA
atggttagttccatatttaa

SEQ ID NO: 2292 - DNA, 20 bp, synthetic construct
  misc_feature 1..20: note = Synthetic construct
  source 1..20: mol_type = other DNA
tggttagttccatatttaag

SEQ ID NO: 2293 - DNA, 20 bp, synthetic construct
  misc_feature 1..20: note = Synthetic construct
  source 1..20: mol_type = other DNA
ggttagttccatatttaagt

SEQ ID NO: 2294 - DNA, 20 bp, synthetic construct
  misc_feature 1..20: note = Synthetic construct
  source 1..20: mol_type = other DNA
gttagttccatatttaagta

SEQ ID NO: 2295 - DNA, 20 bp, synthetic construct
  misc_feature 1..20: note = Synthetic construct
  source 1..20: mol_type = other DNA
ttagttccatatttaagtac

SEQ ID NO: 2296 - DNA, 20 bp, synthetic construct
  misc_feature 1..20: note = Synthetic construct
  source 1..20: mol_type = other DNA
tagttccatatttaagtacg

SEQ ID NO: 2297 - DNA, 20 bp, synthetic construct
  misc_feature 1..20: note = Synthetic construct
  source 1..20: mol_type = other DNA
agttccatatttaagtacga

SEQ ID NO: 2298 - DNA, 20 bp, synthetic construct
  misc_feature 1..20: note = Synthetic construct
  source 1..20: mol_type = other DNA
gttccatatttaagtacgaa

SEQ ID NO: 2299 - DNA, 20 bp, synthetic construct
  misc_feature 1..20: note = Synthetic construct
  source 1..20: mol_type = other DNA
ttccatatttaagtacgaac

SEQ ID NO: 2300 - DNA, 20 bp, synthetic construct
  misc_feature 1..20: note = Synthetic construct
  source 1..20: mol_type = other DNA
tccatatttaagtacgaacg

SEQ ID NO: 2301 - DNA, 20 bp, synthetic construct
  misc_feature 1..20: note = Synthetic construct
  source 1..20: mol_type = other DNA
ccatatttaagtacgaacgc

SEQ ID NO: 2302 - DNA, 20 bp, synthetic construct
  misc_feature 1..20: note = Synthetic construct
  source 1..20: mol_type = other DNA
catatttaagtacgaacgcc

SEQ ID NO: 2303 - DNA, 20 bp, synthetic construct
  misc_feature 1..20: note = Synthetic construct
  source 1..20: mol_type = other DNA
atatttaagtacgaacgcca

SEQ ID NO: 2304 - DNA, 20 bp, synthetic construct
  misc_feature 1..20: note = Synthetic construct
  source 1..20: mol_type = other DNA
tatttaagtacgaacgccat

SEQ ID NO: 2305 - DNA, 20 bp, synthetic construct
  misc_feature 1..20: note = Synthetic construct
  source 1..20: mol_type = other DNA
atttaagtacgaacgccatg

SEQ ID NO: 2306 - DNA, 20 bp, synthetic construct
  misc_feature 1..20: note = Synthetic construct
  source 1..20: mol_type = other DNA
tttaagtacgaacgccatgc

SEQ ID NO: 2307 - DNA, 20 bp, synthetic construct
  misc_feature 1..20: note = Synthetic construct
  source 1..20: mol_type = other DNA
ttaagtacgaacgccatgcg

SEQ ID NO: 2308 - DNA, 20 bp, synthetic construct
  misc_feature 1..20: note = Synthetic construct
  source 1..20: mol_type = other DNA
taagtacgaacgccatgcgg

SEQ ID NO: 2309 - DNA, 20 bp, synthetic construct
  misc_feature 1..20: note = Synthetic construct
  source 1..20: mol_type = other DNA
aagtacgaacgccatgcggc

SEQ ID NO: 2310 - DNA, 20 bp, synthetic construct
  misc_feature 1..20: note = Synthetic construct
  source 1..20: mol_type = other DNA
agtacgaacgccatgcggct

SEQ ID NO: 2311 - DNA, 20 bp, synthetic construct
  misc_feature 1..20: note = Synthetic construct
  source 1..20: mol_type = other DNA
gtacgaacgccatgcggcta

SEQ ID NO: 2312 - DNA, 20 bp, synthetic construct
  misc_feature 1..20: note = Synthetic construct
  source 1..20: mol_type = other DNA
tacgaacgccatgcggctac

SEQ ID NO: 2313 - DNA, 20 bp, synthetic construct
  misc_feature 1..20: note = Synthetic construct
  source 1..20: mol_type = other DNA
acgaacgccatgcggctaca

SEQ ID NO: 2314 - DNA, 20 bp, synthetic construct
  misc_feature 1..20: note = Synthetic construct
  source 1..20: mol_type = other DNA
cgaacgccatgcggctacag

SEQ ID NO: 2315 - DNA, 20 bp, synthetic construct
  misc_feature 1..20: note = Synthetic construct
  source 1..20: mol_type = other DNA
gaacgccatgcggctacagg

SEQ ID NO: 2316 - DNA, 20 bp, synthetic construct
  misc_feature 1..20: note = Synthetic construct
  source 1..20: mol_type = other DNA
aacgccatgcggctacagga

SEQ ID NO: 2317 - DNA, 20 bp, synthetic construct
  misc_feature 1..20: note = Synthetic construct
  source 1..20: mol_type = other DNA
acgccatgcggctacaggaa

SEQ ID NO: 2318 - DNA, 20 bp, synthetic construct
  misc_feature 1..20: note = Synthetic construct
  source 1..20: mol_type = other DNA
cgccatgcggctacaggaag

SEQ ID NO: 2319 - DNA, 20 bp, synthetic construct
  misc_feature 1..20: note = Synthetic construct
  source 1..20: mol_type = other DNA
gccatgcggctacaggaagc

SEQ ID NO: 2320 - DNA, 20 bp, synthetic construct
  misc_feature 1..20: note = Synthetic construct
  source 1..20: mol_type = other DNA
ccatgcggctacaggaagct

SEQ ID NO: 2321 - DNA, 20 bp, synthetic construct
  misc_feature 1..20: note = Synthetic construct
  source 1..20: mol_type = other DNA
catgcggctacaggaagctc

SEQ ID NO: 2322 - DNA, 20 bp, synthetic construct
  misc_feature 1..20: note = Synthetic construct
  source 1..20: mol_type = other DNA
atgcggctacaggaagctct

SEQ ID NO: 2323 - DNA, 20 bp, synthetic construct
  misc_feature 1..20: note = Synthetic construct
  source 1..20: mol_type = other DNA
tgcggctacaggaagctcta

SEQ ID NO: 2324 - DNA, 20 bp, synthetic construct
  misc_feature 1..20: note = Synthetic construct
  source 1..20: mol_type = other DNA
gcggctacaggaagctctac

SEQ ID NO: 2325 - DNA, 20 bp, synthetic construct
  misc_feature 1..20: note = Synthetic construct
  source 1..20: mol_type = other DNA
cggctacaggaagctctaca

SEQ ID NO: 2326 - DNA, 20 bp, synthetic construct
  misc_feature 1..20: note = Synthetic construct
  source 1..20: mol_type = other DNA
ggctacaggaagctctacac

SEQ ID NO: 2327 - DNA, 20 bp, synthetic construct
  misc_feature 1..20: note = Synthetic construct
  source 1..20: mol_type = other DNA
gctacaggaagctctacacc

SEQ ID NO: 2328 - DNA, 20 bp, synthetic construct
  misc_feature 1..20: note = Synthetic construct
  source 1..20: mol_type = other DNA
ctacaggaagctctacacca

SEQ ID NO: 2329 - DNA, 20 bp, synthetic construct
  misc_feature 1..20: note = Synthetic construct
  source 1..20: mol_type = other DNA
tacaggaagctctacaccac

SEQ ID NO: 2330 - DNA, 20 bp, synthetic construct
  misc_feature 1..20: note = Synthetic construct
  source 1..20: mol_type = other DNA
acaggaagctctacaccacc

SEQ ID NO: 2331 - DNA, 20 bp, synthetic construct
  misc_feature 1..20: note = Synthetic construct
  source 1..20: mol_type = other DNA
caggaagctctacaccacca

SEQ ID NO: 2332 - DNA, 20 bp, synthetic construct
  misc_feature 1..20: note = Synthetic construct
  source 1..20: mol_type = other DNA
aggaagctctacaccaccaa

SEQ ID NO: 2333 - DNA, 20 bp, synthetic construct
  misc_feature 1..20: note = Synthetic construct
  source 1..20: mol_type = other DNA
ggaagctctacaccaccaac

SEQ ID NO: 2334 - DNA, 20 bp, synthetic construct
  misc_feature 1..20: note = Synthetic construct
  source 1..20: mol_type = other DNA
gaagctctacaccaccaaca

SEQ ID NO: 2335 - DNA, 20 bp, synthetic construct
  misc_feature 1..20: note = Synthetic construct
  source 1..20: mol_type = other DNA
aagctctacaccaccaacag

SEQ ID NO: 2336 - DNA, 20 bp, synthetic construct
  misc_feature 1..20: note = Synthetic construct
  source 1..20: mol_type = other DNA
agctctacaccaccaacagt

SEQ ID NO: 2337 - DNA, 20 bp, synthetic construct
  misc_feature 1..20: note = Synthetic construct
  source 1..20: mol_type = other DNA
gctctacaccaccaacagtc

SEQ ID NO: 2338 - DNA, 20 bp, synthetic construct
  misc_feature 1..20: note = Synthetic construct
  source 1..20: mol_type = other DNA
ctctacaccaccaacagtct

SEQ ID NO: 2339 - DNA, 20 bp, synthetic construct
  misc_feature 1..20: note = Synthetic construct
  source 1..20: mol_type = other DNA
tctacaccaccaacagtctg

SEQ ID NO: 2340 - DNA, 20 bp, synthetic construct
  misc_feature 1..20: note = Synthetic construct
  source 1..20: mol_type = other DNA
ctacaccaccaacagtctgg

SEQ ID NO: 2341 - DNA, 20 bp, synthetic construct
  misc_feature 1..20: note = Synthetic construct
  source 1..20: mol_type = other DNA
tacaccaccaacagtctggg

SEQ ID NO: 2342 - DNA, 20 bp, synthetic construct
  misc_feature 1..20: note = Synthetic construct
  source 1..20: mol_type = other DNA
acaccaccaacagtctgggt

SEQ ID NO: 2343 - DNA, 20 bp, synthetic construct
  misc_feature 1..20: note = Synthetic construct
  source 1..20: mol_type = other DNA
caccaccaacagtctgggtt

SEQ ID NO: 2344 - DNA, 20 bp, synthetic construct
  misc_feature 1..20: note = Synthetic construct
  source 1..20: mol_type = other DNA
accaccaacagtctgggttg

SEQ ID NO: 2345 - DNA, 20 bp, synthetic construct
  misc_feature 1..20: note = Synthetic construct
  source 1..20: mol_type = other DNA
ccaccaacagtctgggttgc

SEQ ID NO: 2346 - DNA, 20 bp, synthetic construct
  misc_feature 1..20: note = Synthetic construct
  source 1..20: mol_type = other DNA
caccaacagtctgggttgcc

SEQ ID NO: 2347 - DNA, 20 bp, synthetic construct
  misc_feature 1..20: note = Synthetic construct
  source 1..20: mol_type = other DNA
accaacagtctgggttgcca

SEQ ID NO: 2348 - DNA, 20 bp, synthetic construct
  misc_feature 1..20: note = Synthetic construct
  source 1..20: mol_type = other DNA
ccaacagtctgggttgccac

SEQ ID NO: 2349 - DNA, 20 bp, synthetic construct
  misc_feature 1..20: note = Synthetic construct
  source 1..20: mol_type = other DNA
caacagtctgggttgccact

SEQ ID NO: 2350 - DNA, 20 bp, synthetic construct
  misc_feature 1..20: note = Synthetic construct
  source 1..20: mol_type = other DNA
aacagtctgggttgccactt

SEQ ID NO: 2351 - DNA, 20 bp, synthetic construct
  misc_feature 1..20: note = Synthetic construct
  source 1..20: mol_type = other DNA
acagtctgggttgccacttt

SEQ ID NO: 2352 - DNA, 20 bp, synthetic construct
  misc_feature 1..20: note = Synthetic construct
  source 1..20: mol_type = other DNA
cagtctgggttgccacttta

SEQ ID NO: 2353 - DNA, 20 bp, synthetic construct
  misc_feature 1..20: note = Synthetic construct
  source 1..20: mol_type = other DNA
agtctgggttgccactttag

SEQ ID NO: 2354 - DNA, 20 bp, synthetic construct
  misc_feature 1..20: note = Synthetic construct
  source 1..20: mol_type = other DNA
gtctgggttgccactttagg

SEQ ID NO: 2355 - DNA, 20 bp, synthetic construct
  misc_feature 1..20: note = Synthetic construct
  source 1..20: mol_type = other DNA
tctgggttgccactttaggc

SEQ ID NO: 2356 - DNA, 20 bp, synthetic construct
  misc_feature 1..20: note = Synthetic construct
  source 1..20: mol_type = other DNA
ctgggttgccactttaggca

SEQ ID NO: 2357 - DNA, 20 bp, synthetic construct
  misc_feature 1..20: note = Synthetic construct
  source 1..20: mol_type = other DNA
tgggttgccactttaggcac

SEQ ID NO: 2358 - DNA, 20 bp, synthetic construct
  misc_feature 1..20: note = Synthetic construct
  source 1..20: mol_type = other DNA
gggttgccactttaggcacc

SEQ ID NO: 2359 - DNA, 20 bp, synthetic construct
  misc_feature 1..20: note = Synthetic construct
  source 1..20: mol_type = other DNA
ggttgccactttaggcacct

SEQ ID NO: 2360 - DNA, 20 bp, synthetic construct
  misc_feature 1..20: note = Synthetic construct
  source 1..20: mol_type = other DNA
gttgccactttaggcacctc

SEQ ID NO: 2361 - DNA, 20 bp, synthetic construct
  misc_feature 1..20: note = Synthetic construct
  source 1..20: mol_type = other DNA
ttgccactttaggcacctcg

SEQ ID NO: 2362 - DNA, 20 bp, synthetic construct
  misc_feature 1..20: note = Synthetic construct
  source 1..20: mol_type = other DNA
tgccactttaggcacctcga

SEQ ID NO: 2363 - DNA, 20 bp, synthetic construct
  misc_feature 1..20: note = Synthetic construct
  source 1..20: mol_type = other DNA
gccactttaggcacctcgac

SEQ ID NO: 2364 - DNA, 20 bp, synthetic construct
  misc_feature 1..20: note = Synthetic construct
  source 1..20: mol_type = other DNA
ccactttaggcacctcgact

SEQ ID NO: 2365 - DNA, 20 bp, synthetic construct
  misc_feature 1..20: note = Synthetic construct
  source 1..20: mol_type = other DNA
cactttaggcacctcgactt

SEQ ID NO: 2366 - DNA, 20 bp, synthetic construct
  misc_feature 1..20: note = Synthetic construct
  source 1..20: mol_type = other DNA
actttaggcacctcgacttt

SEQ ID NO: 2367 - DNA, 20 bp, synthetic construct
  misc_feature 1..20: note = Synthetic construct
  source 1..20: mol_type = other DNA
ctttaggcacctcgactttg

SEQ ID NO: 2368 - DNA, 20 bp, synthetic construct
  misc_feature 1..20: note = Synthetic construct
  source 1..20: mol_type = other DNA
tttaggcacctcgactttga

SEQ ID NO: 2369 - DNA, 20 bp, synthetic construct
  misc_feature 1..20: note = Synthetic construct
  source 1..20: mol_type = other DNA
ttaggcacctcgactttgat

SEQ ID NO: 2370 - DNA, 20 bp, synthetic construct
  misc_feature 1..20: note = Synthetic construct
  source 1..20: mol_type = other DNA
taggcacctcgactttgatg

SEQ ID NO: 2371 - DNA, 20 bp, synthetic construct
  misc_feature 1..20: note = Synthetic construct
  source 1..20: mol_type = other DNA
aggcacctcgactttgatgg

SEQ ID NO: 2372 - DNA, 20 bp, synthetic construct
  misc_feature 1..20: note = Synthetic construct
  source 1..20: mol_type = other DNA
ggcacctcgactttgatggt

SEQ ID NO: 2373 - DNA, 20 bp, synthetic construct
  misc_feature 1..20: note = Synthetic construct
  source 1..20: mol_type = other DNA
gcacctcgactttgatggtg

SEQ ID NO: 2374 - DNA, 20 bp, synthetic construct
  misc_feature 1..20: note = Synthetic construct
  source 1..20: mol_type = other DNA
cacctcgactttgatggtgt

SEQ ID NO: 2375 - DNA, 20 bp, synthetic construct
  misc_feature 1..20: note = Synthetic construct
  source 1..20: mol_type = other DNA
acctcgactttgatggtgta

SEQ ID NO: 2376 - DNA, 20 bp, synthetic construct
  misc_feature 1..20: note = Synthetic construct
  source 1..20: mol_type = other DNA
cctcgactttgatggtgtat

SEQ ID NO: 2377 - DNA, 20 bp, synthetic construct
  misc_feature 1..20: note = Synthetic construct
  source 1..20: mol_type = other DNA
ctcgactttgatggtgtatt

SEQ ID NO: 2378 - DNA, 20 bp, synthetic construct
  misc_feature 1..20: note = Synthetic construct
  source 1..20: mol_type = other DNA
tcgactttgatggtgtattt

SEQ ID NO: 2379 - DNA, 20 bp, synthetic construct
  misc_feature 1..20: note = Synthetic construct
  source 1..20: mol_type = other DNA
cgactttgatggtgtatttg

SEQ ID NO: 2380 - DNA, 20 bp, synthetic construct
  misc_feature 1..20: note = Synthetic construct
  source 1..20: mol_type = other DNA
gactttgatggtgtatttgc

SEQ ID NO: 2381 - DNA, 20 bp, synthetic construct
  misc_feature 1..20: note = Synthetic construct
  source 1..20: mol_type = other DNA
actttgatggtgtatttgcg

SEQ ID NO: 2382 - DNA, 20 bp, synthetic construct
  misc_feature 1..20: note = Synthetic construct
  source 1..20: mol_type = other DNA
ctttgatggtgtatttgcga

SEQ ID NO: 2383 - DNA, 20 bp, synthetic construct
  misc_feature 1..20: note = Synthetic construct
  source 1..20: mol_type = other DNA
tttgatggtgtatttgcgat

SEQ ID NO: 2384 - DNA, 20 bp, synthetic construct
  misc_feature 1..20: note = Synthetic construct
  source 1..20: mol_type = other DNA
ttgatggtgtatttgcgatt

SEQ ID NO: 2385 - DNA, 20 bp, synthetic construct
  misc_feature 1..20: note = Synthetic construct
  source 1..20: mol_type = other DNA
tgatggtgtatttgcgattc

SEQ ID NO: 2386 - DNA, 20 bp, synthetic construct
  misc_feature 1..20: note = Synthetic construct
  source 1..20: mol_type = other DNA
gatggtgtatttgcgattct

SEQ ID NO: 2387 - DNA, 20 bp, synthetic construct
  misc_feature 1..20: note = Synthetic construct
  source 1..20: mol_type = other DNA
atggtgtatttgcgattctg

SEQ ID NO: 2388 - DNA, 20 bp, synthetic construct
  misc_feature 1..20: note = Synthetic construct
  source 1..20: mol_type = other DNA
tggtgtatttgcgattctgc

SEQ ID NO: 2389 - DNA, 20 bp, synthetic construct
  misc_feature 1..20: note = Synthetic construct
  source 1..20: mol_type = other DNA
ggtgtatttgcgattctgcg

SEQ ID NO: 2390 - DNA, 20 bp, synthetic construct
  misc_feature 1..20: note = Synthetic construct
  source 1..20: mol_type = other DNA
gtgtatttgcgattctgcgc

SEQ ID NO: 2391 - DNA, 20 bp, synthetic construct
  misc_feature 1..20: note = Synthetic construct
  source 1..20: mol_type = other DNA
tgtatttgcgattctgcgca

SEQ ID NO: 2392 - DNA, 20 bp, synthetic construct
  misc_feature 1..20: note = Synthetic construct
  source 1..20: mol_type = other DNA
gtatttgcgattctgcgcag

SEQ ID NO: 2393 - DNA, 20 bp, synthetic construct
  misc_feature 1..20: note = Synthetic construct
  source 1..20: mol_type = other DNA
tatttgcgattctgcgcaga

SEQ ID NO: 2394 - DNA, 20 bp, synthetic construct
  misc_feature 1..20: note = Synthetic construct
  source 1..20: mol_type = other DNA
atttgcgattctgcgcagag

SEQ ID NO: 2395 - DNA, 20 bp, synthetic construct
  misc_feature 1..20: note = Synthetic construct
  source 1..20: mol_type = other DNA
tttgcgattctgcgcagagc

SEQ ID NO: 2396 - DNA, 20 bp, synthetic construct
  misc_feature 1..20: note = Synthetic construct
  source 1..20: mol_type = other DNA
ttgcgattctgcgcagagct

SEQ ID NO: 2397 - DNA, 20 bp, synthetic construct
  misc_feature 1..20: note = Synthetic construct
  source 1..20: mol_type = other DNA
tgcgattctgcgcagagctc

SEQ ID NO: 2398 - DNA, 20 bp, synthetic construct
  misc_feature 1..20: note = Synthetic construct
  source 1..20: mol_type = other DNA
gcgattctgcgcagagctct

SEQ ID NO: 2399 - DNA, 20 bp, synthetic construct
  misc_feature 1..20: note = Synthetic construct
  source 1..20: mol_type = other DNA
cgattctgcgcagagctctg

SEQ ID NO: 2400 - DNA, 20 bp, synthetic construct
  misc_feature 1..20: note = Synthetic construct
  source 1..20: mol_type = other DNA
gattctgcgcagagctctga

SEQ ID NO: 2401 - DNA, 20 bp, synthetic construct
  misc_feature 1..20: note = Synthetic construct
  source 1..20: mol_type = other DNA
attctgcgcagagctctgac

SEQ ID NO: 2402 - DNA, 20 bp, synthetic construct
  misc_feature 1..20: note = Synthetic construct
  source 1..20: mol_type = other DNA
ttctgcgcagagctctgacg

SEQ ID NO: 2403 - DNA, 20 bp, synthetic construct
  misc_feature 1..20: note = Synthetic construct
  source 1..20: mol_type = other DNA
tctgcgcagagctctgacga

SEQ ID NO: 2404 - DNA, 20 bp, synthetic construct
  misc_feature 1..20: note = Synthetic construct
  source 1..20: mol_type = other DNA
ctgcgcagagctctgacgaa

SEQ ID NO: 2405 - DNA, 20 bp, synthetic construct
  misc_feature 1..20: note = Synthetic construct
  source 1..20: mol_type = other DNA
tgcgcagagctctgacgaac

SEQ ID NO: 2406 - DNA, 20 bp, synthetic construct
  misc_feature 1..20: note = Synthetic construct
  source 1..20: mol_type = other DNA
gcgcagagctctgacgaacg

SEQ ID NO: 2407 - DNA, 20 bp, synthetic construct
  misc_feature 1..20: note = Synthetic construct
  source 1..20: mol_type = other DNA
cgcagagctctgacgaacgc

SEQ ID NO: 2408 - DNA, 20 bp, synthetic construct
  misc_feature 1..20: note = Synthetic construct
  source 1..20: mol_type = other DNA
gcagagctctgacgaacgct

SEQ ID NO: 2409 - DNA, 20 bp, synthetic construct
  misc_feature 1..20: note = Synthetic construct
  source 1..20: mol_type = other DNA
cagagctctgacgaacgcta

SEQ ID NO: 2410 - DNA, 20 bp, synthetic construct
  misc_feature 1..20: note = Synthetic construct
  source 1..20: mol_type = other DNA
agagctctgacgaacgctac

SEQ ID NO: 2411 - DNA, 20 bp, synthetic construct
  misc_feature 1..20: note = Synthetic construct
  source 1..20: mol_type = other DNA
gagctctgacgaacgctaca

SEQ ID NO: 2412 - DNA, 20 bp, synthetic construct
  misc_feature 1..20: note = Synthetic construct
  source 1..20: mol_type = other DNA
agctctgacgaacgctacag

SEQ ID NO: 2413 - DNA, 20 bp, synthetic construct
  misc_feature 1..20: note = Synthetic construct
  source 1..20: mol_type = other DNA
gctctgacgaacgctacagg

SEQ ID NO: 2414 - DNA, 20 bp, synthetic construct
  misc_feature 1..20: note = Synthetic construct
  source 1..20: mol_type = other DNA
ctctgacgaacgctacaggt

SEQ ID NO: 2415 - DNA, 20 bp, synthetic construct
  misc_feature 1..20: note = Synthetic construct
  source 1..20: mol_type = other DNA
tctgacgaacgctacaggtt

SEQ ID NO: 2416 - DNA, 20 bp, synthetic construct
  misc_feature 1..20: note = Synthetic construct
  source 1..20: mol_type = other DNA
ctgacgaacgctacaggtta

SEQ ID NO: 2417 - DNA, 20 bp, synthetic construct
  misc_feature 1..20: note = Synthetic construct
  source 1..20: mol_type = other DNA
tgacgaacgctacaggttac

SEQ ID NO: 2418 - DNA, 20 bp, synthetic construct
  misc_feature 1..20: note = Synthetic construct
  source 1..20: mol_type = other DNA
gacgaacgctacaggttact

SEQ ID NO: 2419 - DNA, 20 bp, synthetic construct
  misc_feature 1..20: note = Synthetic construct
  source 1..20: mol_type = other DNA
acgaacgctacaggttactt

SEQ ID NO: 2420 - DNA, 20 bp, synthetic construct
  misc_feature 1..20: note = Synthetic construct
  source 1..20: mol_type = other DNA
cgaacgctacaggttacttt

SEQ ID NO: 2421 - DNA, 20 bp, synthetic construct
  misc_feature 1..20: note = Synthetic construct
  source 1..20: mol_type = other DNA
gaacgctacaggttactttg

SEQ ID NO: 2422 - DNA, 20 bp, synthetic construct
  misc_feature 1..20: note = Synthetic construct
  source 1..20: mol_type = other DNA
aacgctacaggttactttgt

SEQ ID NO: 2423 - DNA, 20 bp, synthetic construct
  misc_feature 1..20: note = Synthetic construct
  source 1..20: mol_type = other DNA
acgctacaggttactttgta

SEQ ID NO: 2424 - DNA, 20 bp, synthetic construct
  misc_feature 1..20: note = Synthetic construct
  source 1..20: mol_type = other DNA
cgctacaggttactttgtaa

SEQ ID NO: 2425 - DNA, 20 bp, synthetic construct
  misc_feature 1..20: note = Synthetic construct
  source 1..20: mol_type = other DNA
gctacaggttactttgtaag

SEQ ID NO: 2426 - DNA, 20 bp, synthetic construct
  misc_feature 1..20: note = Synthetic construct
  source 1..20: mol_type = other DNA
ctacaggttactttgtaagc

SEQ ID NO: 2427 - DNA, 20 bp, synthetic construct
  misc_feature 1..20: note = Synthetic construct
  source 1..20: mol_type = other DNA
tacaggttactttgtaagcc

SEQ ID NO: 2428 - DNA, 20 bp, synthetic construct
  misc_feature 1..20: note = Synthetic construct
  source 1..20: mol_type = other DNA
acaggttactttgtaagcct

SEQ ID NO: 2429 - DNA, 20 bp, synthetic construct
  misc_feature 1..20: note = Synthetic construct
  source 1..20: mol_type = other DNA
caggttactttgtaagcctg

SEQ ID NO: 2430 - DNA, 20 bp, synthetic construct
  misc_feature 1..20: note = Synthetic construct
  source 1..20: mol_type = other DNA
aggttactttgtaagcctgt

SEQ ID NO: 2431 - DNA, 20 bp, synthetic construct
  misc_feature 1..20: note = Synthetic construct
  source 1..20: mol_type = other DNA
ggttactttgtaagcctgtg

SEQ ID NO: 2432 - DNA, 20 bp, synthetic construct
  misc_feature 1..20: note = Synthetic construct
  source 1..20: mol_type = other DNA
gttactttgtaagcctgtga

SEQ ID NO: 2433 - DNA, 20 bp, synthetic construct
  misc_feature 1..20: note = Synthetic construct
  source 1..20: mol_type = other DNA
ttactttgtaagcctgtgaa

SEQ ID NO: 2434 - DNA, 20 bp, synthetic construct
  misc_feature 1..20: note = Synthetic construct
  source 1..20: mol_type = other DNA
tactttgtaagcctgtgaac

SEQ ID NO: 2435 - DNA, 20 bp, synthetic construct
  misc_feature 1..20: note = Synthetic construct
  source 1..20: mol_type = other DNA
actttgtaagcctgtgaacg

SEQ ID NO: 2436 - DNA, 20 bp, synthetic construct
  misc_feature 1..20: note = Synthetic construct
  source 1..20: mol_type = other DNA
ctttgtaagcctgtgaacgc

SEQ ID NO: 2437 - DNA, 20 bp, synthetic construct
  misc_feature 1..20: note = Synthetic construct
  source 1..20: mol_type = other DNA
tttgtaagcctgtgaacgcg

SEQ ID NO: 2438 - DNA, 20 bp, synthetic construct
  misc_feature 1..20: note = Synthetic construct
  source 1..20: mol_type = other DNA
ttgtaagcctgtgaacgcga

SEQ ID NO: 2439 - DNA, 20 bp, synthetic construct
  misc_feature 1..20: note = Synthetic construct
  source 1..20: mol_type = other DNA
tgtaagcctgtgaacgcgag

SEQ ID NO: 2440 - DNA, 20 bp, synthetic construct
  misc_feature 1..20: note = Synthetic construct
  source 1..20: mol_type = other DNA
gtaagcctgtgaacgcgagt

SEQ ID NO: 2441 - DNA, 20 bp, synthetic construct
  misc_feature 1..20: note = Synthetic construct
  source 1..20: mol_type = other DNA
taagcctgtgaacgcgagtt

SEQ ID NO: 2442 - DNA, 20 bp, synthetic construct
  misc_feature 1..20: note = Synthetic construct
  source 1..20: mol_type = other DNA
aagcctgtgaacgcgagtta

SEQ ID NO: 2443 - DNA, 20 bp, synthetic construct
  misc_feature 1..20: note = Synthetic construct
  source 1..20: mol_type = other DNA
agcctgtgaacgcgagttag

SEQ ID NO: 2444 - DNA, 20 bp, synthetic construct
  misc_feature 1..20: note = Synthetic construct
  source 1..20: mol_type = other DNA
gcctgtgaacgcgagttaga

SEQ ID NO: 2445 - DNA, 20 bp, synthetic construct
  misc_feature 1..20: note = Synthetic construct
  source 1..20: mol_type = other DNA
cctgtgaacgcgagttagag

SEQ ID NO: 2446 - DNA, 20 bp, synthetic construct
  misc_feature 1..20: note = Synthetic construct
  source 1..20: mol_type = other DNA
ctgtgaacgcgagttagagc

SEQ ID NO: 2447 - DNA, 20 bp, synthetic construct
  misc_feature 1..20: note = Synthetic construct
  source 1..20: mol_type = other DNA
tgtgaacgcgagttagagct

SEQ ID NO: 2448 - DNA, 20 bp, synthetic construct
  misc_feature 1..20: note = Synthetic construct
  source 1..20: mol_type = other DNA
gtgaacgcgagttagagctg

SEQ ID NO: 2449 - DNA, 20 bp, synthetic construct
  misc_feature 1..20: note = Synthetic construct
  source 1..20: mol_type = other DNA
tgaacgcgagttagagctga

SEQ ID NO: 2450 - DNA, 20 bp, synthetic construct
  misc_feature 1..20: note = Synthetic construct
  source 1..20: mol_type = other DNA
gaacgcgagttagagctgat

SEQ ID NO: 2451 - DNA, 20 bp, synthetic construct
  misc_feature 1..20: note = Synthetic construct
  source 1..20: mol_type = other DNA
aacgcgagttagagctgatc

SEQ ID NO: 2452 - DNA, 20 bp, synthetic construct
  misc_feature 1..20: note = Synthetic construct
  source 1..20: mol_type = other DNA
acgcgagttagagctgatcc

SEQ ID NO: 2453 - DNA, 20 bp, synthetic construct
  misc_feature 1..20: note = Synthetic construct
  source 1..20: mol_type = other DNA
cgcgagttagagctgatcca

SEQ ID NO: 2454 - DNA, 20 bp, synthetic construct
  misc_feature 1..20: note = Synthetic construct
  source 1..20: mol_type = other DNA
gcgagttagagctgatccat

SEQ ID NO: 2455 - DNA, 20 bp, synthetic construct
  misc_feature 1..20: note = Synthetic construct
  source 1..20: mol_type = other DNA
cgagttagagctgatccatt

SEQ ID NO: 2456 - DNA, 20 bp, synthetic construct
  misc_feature 1..20: note = Synthetic construct
  source 1..20: mol_type = other DNA
gagttagagctgatccattc

SEQ ID NO: 2457 - DNA, 20 bp, synthetic construct
  misc_feature 1..20: note = Synthetic construct
  source 1..20: mol_type = other DNA
agttagagctgatccattca

SEQ ID NO: 2458 - DNA, 20 bp, synthetic construct
  misc_feature 1..20: note = Synthetic construct
  source 1..20: mol_type = other DNA
gttagagctgatccattcag

SEQ ID NO: 2459 - DNA, 20 bp, synthetic construct
  misc_feature 1..20: note = Synthetic construct
  source 1..20: mol_type = other DNA
ttagagctgatccattcagc

SEQ ID NO: 2460 - DNA, 20 bp, synthetic construct
  misc_feature 1..20: note = Synthetic construct
  source 1..20: mol_type = other DNA
tagagctgatccattcagcg

SEQ ID NO: 2461 - DNA, 20 bp, synthetic construct
  misc_feature 1..20: note = Synthetic construct
  source 1..20: mol_type = other DNA
agagctgatccattcagcga

SEQ ID NO: 2462 - DNA, 20 bp, synthetic construct
  misc_feature 1..20: note = Synthetic construct
  source 1..20: mol_type = other DNA
gagctgatccattcagcgac

SEQ ID NO: 2463 - DNA, 20 bp, synthetic construct
  misc_feature 1..20: note = Synthetic construct
  source 1..20: mol_type = other DNA
agctgatccattcagcgacc

SEQ ID NO: 2464 - DNA, 20 bp, synthetic construct
  misc_feature 1..20: note = Synthetic construct
  source 1..20: mol_type = other DNA
gctgatccattcagcgaccc

SEQ ID NO: 2465 - DNA, 20 bp, synthetic construct
  misc_feature 1..20: note = Synthetic construct
  source 1..20: mol_type = other DNA
ctgatccattcagcgacccc

SEQ ID NO: 2466 - DNA, 20 bp, synthetic construct
  misc_feature 1..20: note = Synthetic construct
  source 1..20: mol_type = other DNA
tgatccattcagcgaccccg

SEQ ID NO: 2467 - DNA, 20 bp, synthetic construct
  misc_feature 1..20: note = Synthetic construct
  source 1..20: mol_type = other DNA
gatccattcagcgaccccgt

SEQ ID NO: 2468 - DNA, 20 bp, synthetic construct
  misc_feature 1..20: note = Synthetic construct
  source 1..20: mol_type = other DNA
atccattcagcgaccccgtt

SEQ ID NO: 2469 - DNA, 20 bp, synthetic construct
  misc_feature 1..20: note = Synthetic construct
  source 1..20: mol_type = other DNA
tccattcagcgaccccgtta

SEQ ID NO: 2470 - DNA, 20 bp, synthetic construct
  misc_feature 1..20: note = Synthetic construct
  source 1..20: mol_type = other DNA
ccattcagcgaccccgttag

SEQ ID NO: 2471 - DNA, 20 bp, synthetic construct
  misc_feature 1..20: note = Synthetic construct
  source 1..20: mol_type = other DNA
cattcagcgaccccgttagc

SEQ ID NO: 2472 - DNA, 20 bp, synthetic construct
  misc_feature 1..20: note = Synthetic construct
  source 1..20: mol_type = other DNA
attcagcgaccccgttagcg

SEQ ID NO: 2473 - DNA, 20 bp, synthetic construct
  misc_feature 1..20: note = Synthetic construct
  source 1..20: mol_type = other DNA
ttcagcgaccccgttagcga

SEQ ID NO: 2474 - DNA, 20 bp, synthetic construct
  misc_feature 1..20: note = Synthetic construct
  source 1..20: mol_type = other DNA
tcagcgaccccgttagcgaa

SEQ ID NO: 2475 - DNA, 20 bp, synthetic construct
  misc_feature 1..20: note = Synthetic construct
  source 1..20: mol_type = other DNA
cagcgaccccgttagcgaag

SEQ ID NO: 2476 - DNA, 20 bp, synthetic construct
  misc_feature 1..20: note = Synthetic construct
  source 1..20: mol_type = other DNA
agcgaccccgttagcgaagt

SEQ ID NO: 2477 - DNA, 20 bp, synthetic construct
  misc_feature 1..20: note = Synthetic construct
  source 1..20: mol_type = other DNA
gcgaccccgttagcgaagtt

SEQ ID NO: 2478 - DNA, 20 bp, synthetic construct
  misc_feature 1..20: note = Synthetic construct
  source 1..20: mol_type = other DNA
cgaccccgttagcgaagttg

SEQ ID NO: 2479 - DNA, 20 bp, synthetic construct
  misc_feature 1..20: note = Synthetic construct
  source 1..20: mol_type = other DNA
gaccccgttagcgaagttgc

SEQ ID NO: 2480 - DNA, 20 bp, synthetic construct
  misc_feature 1..20: note = Synthetic construct
  source 1..20: mol_type = other DNA
accccgttagcgaagttgct

SEQ ID NO: 2481 - DNA, 20 bp, synthetic construct
  misc_feature 1..20: note = Synthetic construct
  source 1..20: mol_type = other DNA
ccccgttagcgaagttgctt

SEQ ID NO: 2482 - DNA, 20 bp, synthetic construct
  misc_feature 1..20: note = Synthetic construct
  source 1..20: mol_type = other DNA
cccgttagcgaagttgcttg

SEQ ID NO: 2483 - DNA, 20 bp, synthetic construct
  misc_feature 1..20: note = Synthetic construct
  source 1..20: mol_type = other DNA
ccgttagcgaagttgcttgg

SEQ ID NO: 2484 - DNA, 20 bp, synthetic construct
  misc_feature 1..20: note = Synthetic construct
  source 1..20: mol_type = other DNA
cgttagcgaagttgcttggg

SEQ ID NO: 2485 - DNA, 20 bp, synthetic construct
  misc_feature 1..20: note = Synthetic construct
  source 1..20: mol_type = other DNA
gttagcgaagttgcttgggg

SEQ ID NO: 2486 - DNA, 20 bp, synthetic construct
  misc_feature 1..20: note = Synthetic construct
  source 1..20: mol_type = other DNA
ttagcgaagttgcttggggc

SEQ ID NO: 2487 - DNA, 20 bp, synthetic construct
  misc_feature 1..20: note = Synthetic construct
  source 1..20: mol_type = other DNA
tagcgaagttgcttggggcg

SEQ ID NO: 2488 - DNA, 20 bp, synthetic construct
  misc_feature 1..20: note = Synthetic construct
  source 1..20: mol_type = other DNA
agcgaagttgcttggggcga

SEQ ID NO: 2489 - DNA, 20 bp, synthetic construct
  misc_feature 1..20: note = Synthetic construct
  source 1..20: mol_type = other DNA
gcgaagttgcttggggcgac

SEQ ID NO: 2490 - DNA, 20 bp, synthetic construct
  misc_feature 1..20: note = Synthetic construct
  source 1..20: mol_type = other DNA
cgaagttgcttggggcgaca

SEQ ID NO: 2491 - DNA, 20 bp, synthetic construct
  misc_feature 1..20: note = Synthetic construct
  source 1..20: mol_type = other DNA
gaagttgcttggggcgacag

SEQ ID NO: 2492 - DNA, 20 bp, synthetic construct
  misc_feature 1..20: note = Synthetic construct
  source 1..20: mol_type = other DNA
aagttgcttggggcgacagt

SEQ ID NO: 2493 - DNA, 20 bp, synthetic construct
  misc_feature 1..20: note = Synthetic construct
  source 1..20: mol_type = other DNA
agttgcttggggcgacagtc

SEQ ID NO: 2494 - DNA, 20 bp, synthetic construct
  misc_feature 1..20: note = Synthetic construct
  source 1..20: mol_type = other DNA
gttgcttggggcgacagtca

SEQ ID NO: 2495 - DNA, 20 bp, synthetic construct
  misc_feature 1..20: note = Synthetic construct
  source 1..20: mol_type = other DNA
ttgcttggggcgacagtcac

SEQ ID NO: 2496 - DNA, 20 bp, synthetic construct
  misc_feature 1..20: note = Synthetic construct
  source 1..20: mol_type = other DNA
tgcttggggcgacagtcacg

SEQ ID NO: 2497 - DNA, 20 bp, synthetic construct
  misc_feature 1..20: note = Synthetic construct
  source 1..20: mol_type = other DNA
gcttggggcgacagtcacgt

SEQ ID NO: 2498 - DNA, 20 bp, synthetic construct
  misc_feature 1..20: note = Synthetic construct
  source 1..20: mol_type = other DNA
cttggggcgacagtcacgtc

SEQ ID NO: 2499 - DNA, 20 bp, synthetic construct
  misc_feature 1..20: note = Synthetic construct
  source 1..20: mol_type = other DNA
ttggggcgacagtcacgtcg

SEQ ID NO: 2500 - DNA, 20 bp, synthetic construct
  misc_feature 1..20: note = Synthetic construct
  source 1..20: mol_type = other DNA
tggggcgacagtcacgtcgc

SEQ ID NO: 2501 - DNA, 20 bp, synthetic construct
  misc_feature 1..20: note = Synthetic construct
  source 1..20: mol_type = other DNA
ggggcgacagtcacgtcgcc

SEQ ID NO: 2502 - DNA, 20 bp, synthetic construct
  misc_feature 1..20: note = Synthetic construct
  source 1..20: mol_type = other DNA
gggcgacagtcacgtcgcca

SEQ ID NO: 2503 - DNA, 20 bp, synthetic construct
  misc_feature 1..20: note = Synthetic construct
  source 1..20: mol_type = other DNA
ggcgacagtcacgtcgccag

SEQ ID NO: 2504 - DNA, 20 bp, synthetic construct
  misc_feature 1..20: note = Synthetic construct
  source 1..20: mol_type = other DNA
gcgacagtcacgtcgccagt

SEQ ID NO: 2505 - DNA, 20 bp, synthetic construct
  misc_feature 1..20: note = Synthetic construct
  source 1..20: mol_type = other DNA
cgacagtcacgtcgccagtt

SEQ ID NO: 2506 - DNA, 20 bp, synthetic construct
  misc_feature 1..20: note = Synthetic construct
  source 1..20: mol_type = other DNA
gacagtcacgtcgccagttc

SEQ ID NO: 2507 - DNA, 20 bp, synthetic construct
  misc_feature 1..20: note = Synthetic construct
  source 1..20: mol_type = other DNA
acagtcacgtcgccagttcc

SEQ ID NO: 2508 - DNA, 20 bp, synthetic construct
  misc_feature 1..20: note = Synthetic construct
  source 1..20: mol_type = other DNA
cagtcacgtcgccagttccg

SEQ ID NO: 2509 - DNA, 20 bp, synthetic construct
  misc_feature 1..20: note = Synthetic construct
  source 1..20: mol_type = other DNA
agtcacgtcgccagttccgc

SEQ ID NO: 2510 - DNA, 20 bp, synthetic construct
  misc_feature 1..20: note = Synthetic construct
  source 1..20: mol_type = other DNA
gtcacgtcgccagttccgcc

SEQ ID NO: 2511 - DNA, 20 bp, synthetic construct
  misc_feature 1..20: note = Synthetic construct
  source 1..20: mol_type = other DNA
tcacgtcgccagttccgcca

SEQ ID NO: 2512 - DNA, 20 bp, synthetic construct
  misc_feature 1..20: note = Synthetic construct
  source 1..20: mol_type = other DNA
cacgtcgccagttccgccat

SEQ ID NO: 2513 - DNA, 20 bp, synthetic construct
  misc_feature 1..20: note = Synthetic construct
  source 1..20: mol_type = other DNA
acgtcgccagttccgccatt

SEQ ID NO: 2514 - DNA, 20 bp, synthetic construct
  misc_feature 1..20: note = Synthetic construct
  source 1..20: mol_type = other DNA
cgtcgccagttccgccattg

SEQ ID NO: 2515 - DNA, 20 bp, synthetic construct
  misc_feature 1..20: note = Synthetic construct
  source 1..20: mol_type = other DNA
gtcgccagttccgccattgt

SEQ ID NO: 2516 - DNA, 20 bp, synthetic construct
  misc_feature 1..20: note = Synthetic construct
  source 1..20: mol_type = other DNA
tcgccagttccgccattgtc

SEQ ID NO: 2517 - DNA, 20 bp, synthetic construct
  misc_feature 1..20: note = Synthetic construct
  source 1..20: mol_type = other DNA
cgccagttccgccattgtcg

SEQ ID NO: 2518 - DNA, 20 bp, synthetic construct
  misc_feature 1..20: note = Synthetic construct
  source 1..20: mol_type = other DNA
gccagttccgccattgtcga

SEQ ID NO: 2519 - DNA, 20 bp, synthetic construct
  misc_feature 1..20: note = Synthetic construct
  source 1..20: mol_type = other DNA
ccagttccgccattgtcgac

SEQ ID NO: 2520 - DNA, 20 bp, synthetic construct
  misc_feature 1..20: note = Synthetic construct
  source 1..20: mol_type = other DNA
cagttccgccattgtcgacg

SEQ ID NO: 2521 - DNA, 20 bp, synthetic construct
  misc_feature 1..20: note = Synthetic construct
  source 1..20: mol_type = other DNA
agttccgccattgtcgacga

SEQ ID NO: 2522 - DNA, 20 bp, synthetic construct
  misc_feature 1..20: note = Synthetic construct
  source 1..20: mol_type = other DNA
gttccgccattgtcgacgag

SEQ ID NO: 2523 - DNA, 20 bp, synthetic construct
  misc_feature 1..20: note = Synthetic construct
  source 1..20: mol_type = other DNA
ttccgccattgtcgacgaga

SEQ ID NO: 2524 - DNA, 20 bp, synthetic construct
  misc_feature 1..20: note = Synthetic construct
  source 1..20: mol_type = other DNA
tccgccattgtcgacgagaa

SEQ ID NO: 2525 - DNA, 20 bp, synthetic construct
  misc_feature 1..20: note = Synthetic construct
  source 1..20: mol_type = other DNA
ccgccattgtcgacgagaac

SEQ ID NO: 2526 - DNA, 20 bp, synthetic construct
  misc_feature 1..20: note = Synthetic construct
  source 1..20: mol_type = other DNA
cgccattgtcgacgagaacg

SEQ ID NO: 2527 - DNA, 20 bp, synthetic construct
  misc_feature 1..20: note = Synthetic construct
  source 1..20: mol_type = other DNA
gccattgtcgacgagaacga

SEQ ID NO: 2528 - DNA, 20 bp, synthetic construct
  misc_feature 1..20: note = Synthetic construct
  source 1..20: mol_type = other DNA
ccattgtcgacgagaacgaa

SEQ ID NO: 2529 - DNA, 20 bp, synthetic construct
  misc_feature 1..20: note = Synthetic construct
  source 1..20: mol_type = other DNA
cattgtcgacgagaacgaac

SEQ ID NO: 2530 - DNA, 20 bp, synthetic construct
  misc_feature 1..20: note = Synthetic construct
  source 1..20: mol_type = other DNA
attgtcgacgagaacgaact

SEQ ID NO: 2531 - DNA, 20 bp, synthetic construct
  misc_feature 1..20: note = Synthetic construct
  source 1..20: mol_type = other DNA
ttgtcgacgagaacgaactg

SEQ ID NO: 2532 - DNA, 20 bp, synthetic construct
  misc_feature 1..20: note = Synthetic construct
  source 1..20: mol_type = other DNA
tgtcgacgagaacgaactga

SEQ ID NO: 2533 - DNA, 20 bp, synthetic construct
  misc_feature 1..20: note = Synthetic construct
  source 1..20: mol_type = other DNA
gtcgacgagaacgaactgag

SEQ ID NO: 2534 - DNA, 20 bp, synthetic construct
  misc_feature 1..20: note = Synthetic construct
  source 1..20: mol_type = other DNA
tcgacgagaacgaactgagt

SEQ ID NO: 2535 - DNA, 20 bp, synthetic construct
  misc_feature 1..20: note = Synthetic construct
  source 1..20: mol_type = other DNA
cgacgagaacgaactgagta

SEQ ID NO: 2536 - DNA, 20 bp, synthetic construct
  misc_feature 1..20: note = Synthetic construct
  source 1..20: mol_type = other DNA
gacgagaacgaactgagtaa

SEQ ID NO: 2537 - DNA, 20 bp, synthetic construct
  misc_feature 1..20: note = Synthetic construct
  source 1..20: mol_type = other DNA
acgagaacgaactgagtaaa

SEQ ID NO: 2538 - DNA, 20 bp, synthetic construct
  misc_feature 1..20: note = Synthetic construct
  source 1..20: mol_type = other DNA
cgagaacgaactgagtaaag

SEQ ID NO: 2539 - DNA, 20 bp, synthetic construct
  misc_feature 1..20: note = Synthetic construct
  source 1..20: mol_type = other DNA
gagaacgaactgagtaaagt

SEQ ID NO: 2540 - DNA, 20 bp, synthetic construct
  misc_feature 1..20: note = Synthetic construct
  source 1..20: mol_type = other DNA
agaacgaactgagtaaagtt

SEQ ID NO: 2541 - DNA, 20 bp, synthetic construct
  misc_feature 1..20: note = Synthetic construct
  source 1..20: mol_type = other DNA
gaacgaactgagtaaagtta

SEQ ID NO: 2542 - DNA, 20 bp, synthetic construct
  misc_feature 1..20: note = Synthetic construct
  source 1..20: mol_type = other DNA
aacgaactgagtaaagttag

SEQ ID NO: 2543 - DNA, 20 bp, synthetic construct
  misc_feature 1..20: note = Synthetic construct
  source 1..20: mol_type = other DNA
acgaactgagtaaagttaga

SEQ ID NO: 2544 - DNA, 20 bp, synthetic construct
  misc_feature 1..20: note = Synthetic construct
  source 1..20: mol_type = other DNA
cgaactgagtaaagttagaa

SEQ ID NO: 2545 - DNA, 20 bp, synthetic construct
  misc_feature 1..20: note = Synthetic construct
  source 1..20: mol_type = other DNA
gaactgagtaaagttagaag

SEQ ID NO: 2546 - DNA, 20 bp, synthetic construct
  misc_feature 1..20: note = Synthetic construct
  source 1..20: mol_type = other DNA
aactgagtaaagttagaagc

SEQ ID NO: 2547 - DNA, 20 bp, synthetic construct
  misc_feature 1..20: note = Synthetic construct
  source 1..20: mol_type = other DNA
actgagtaaagttagaagcc

SEQ ID NO: 2548 - DNA, 20 bp, synthetic construct
  misc_feature 1..20: note = Synthetic construct
  source 1..20: mol_type = other DNA
ctgagtaaagttagaagcca

SEQ ID NO: 2549 - DNA, 20 bp, synthetic construct
  misc_feature 1..20: note = Synthetic construct
  source 1..20: mol_type = other DNA
tgagtaaagttagaagccat

SEQ ID NO: 2550 - DNA, 20 bp, synthetic construct
  misc_feature 1..20: note = Synthetic construct
  source 1..20: mol_type = other DNA
gagtaaagttagaagccatg

SEQ ID NO: 2551 - DNA, 20 bp, synthetic construct
  misc_feature 1..20: note = Synthetic construct
  source 1..20: mol_type = other DNA
agtaaagttagaagccatgc

SEQ ID NO: 2552 - DNA, 20 bp, synthetic construct
  misc_feature 1..20: note = Synthetic construct
  source 1..20: mol_type = other DNA
gtaaagttagaagccatgct

SEQ ID NO: 2553 - DNA, 20 bp, synthetic construct
  misc_feature 1..20: note = Synthetic construct
  source 1..20: mol_type = other DNA
taaagttagaagccatgctt

SEQ ID NO: 2554 - DNA, 20 bp, synthetic construct
  misc_feature 1..20: note = Synthetic construct
  source 1..20: mol_type = other DNA
aaagttagaagccatgcttc

SEQ ID NO: 2555 - DNA, 20 bp, synthetic construct
  misc_feature 1..20: note = Synthetic construct
  source 1..20: mol_type = other DNA
aagttagaagccatgcttca

SEQ ID NO: 2556 - DNA, 20 bp, synthetic construct
  misc_feature 1..20: note = Synthetic construct
  source 1..20: mol_type = other DNA
agttagaagccatgcttcaa

SEQ ID NO: 2557 - DNA, 20 bp, synthetic construct
  misc_feature 1..20: note = Synthetic construct
  source 1..20: mol_type = other DNA
gttagaagccatgcttcaaa

SEQ ID NO: 2558 - DNA, 20 bp, synthetic construct
  misc_feature 1..20: note = Synthetic construct
  source 1..20: mol_type = other DNA
ttagaagccatgcttcaaac

SEQ ID NO: 2559 - DNA, 20 bp, synthetic construct
  misc_feature 1..20: note = Synthetic construct
  source 1..20: mol_type = other DNA
tagaagccatgcttcaaact

SEQ ID NO: 2560 - DNA, 20 bp, synthetic construct
  misc_feature 1..20: note = Synthetic construct
  source 1..20: mol_type = other DNA
agaagccatgcttcaaactc

SEQ ID NO: 2561 - DNA, 20 bp, synthetic construct
  misc_feature 1..20: note = Synthetic construct
  source 1..20: mol_type = other DNA
gaagccatgcttcaaactcc

SEQ ID NO: 2562 - DNA, 20 bp, synthetic construct
  misc_feature 1..20: note = Synthetic construct
  source 1..20: mol_type = other DNA
aagccatgcttcaaactccg

SEQ ID NO: 2563 - DNA, 20 bp, synthetic construct
  misc_feature 1..20: note = Synthetic construct
  source 1..20: mol_type = other DNA
agccatgcttcaaactccgg

SEQ ID NO: 2564 - DNA, 20 bp, synthetic construct
  misc_feature 1..20: note = Synthetic construct
  source 1..20: mol_type = other DNA
gccatgcttcaaactccggt

SEQ ID NO: 2565 - DNA, 20 bp, synthetic construct
  misc_feature 1..20: note = Synthetic construct
  source 1..20: mol_type = other DNA
ccatgcttcaaactccggtt

SEQ ID NO: 2566 - DNA, 20 bp, synthetic construct
  misc_feature 1..20: note = Synthetic construct
  source 1..20: mol_type = other DNA
catgcttcaaactccggttg

SEQ ID NO: 2567 - DNA, 20 bp, synthetic construct
  misc_feature 1..20: note = Synthetic construct
  source 1..20: mol_type = other DNA
atgcttcaaactccggttga

SEQ ID NO: 2568 - DNA, 20 bp, synthetic construct
  misc_feature 1..20: note = Synthetic construct
  source 1..20: mol_type = other DNA
tgcttcaaactccggttgag

SEQ ID NO: 2569 - DNA, 20 bp, synthetic construct
  misc_feature 1..20: note = Synthetic construct
  source 1..20: mol_type = other DNA
gcttcaaactccggttgagg

SEQ ID NO: 2570 - DNA, 20 bp, synthetic construct
  misc_feature 1..20: note = Synthetic construct
  source 1..20: mol_type = other DNA
cttcaaactccggttgaggg

SEQ ID NO: 2571 - DNA, 20 bp, synthetic construct
  misc_feature 1..20: note = Synthetic construct
  source 1..20: mol_type = other DNA
ttcaaactccggttgagggc

SEQ ID NO: 2572 - DNA, 20 bp, synthetic construct
  misc_feature 1..20: note = Synthetic construct
  source 1..20: mol_type = other DNA
tcaaactccggttgagggct

SEQ ID NO: 2573 - DNA, 20 bp, synthetic construct
  misc_feature 1..20: note = Synthetic construct
  source 1..20: mol_type = other DNA
caaactccggttgagggctc

SEQ ID NO: 2574 - DNA, 20 bp, synthetic construct
  misc_feature 1..20: note = Synthetic construct
  source 1..20: mol_type = other DNA
aaactccggttgagggctct

SEQ ID NO: 2575 - DNA, 20 bp, synthetic construct
  misc_feature 1..20: note = Synthetic construct
  source 1..20: mol_type = other DNA
aactccggttgagggctcta

SEQ ID NO: 2576 - DNA, 20 bp, synthetic construct
  misc_feature 1..20: note = Synthetic construct
  source 1..20: mol_type = other DNA
actccggttgagggctctat

SEQ ID NO: 2577 - DNA, 20 bp, synthetic construct
  misc_feature 1..20: note = Synthetic construct
  source 1..20: mol_type = other DNA
ctccggttgagggctctatc

SEQ ID NO: 2578 - DNA, 20 bp, synthetic construct
  misc_feature 1..20: note = Synthetic construct
  source 1..20: mol_type = other DNA
tccggttgagggctctatct

SEQ ID NO: 2579 - DNA, 20 bp, synthetic construct
  misc_feature 1..20: note = Synthetic construct
  source 1..20: mol_type = other DNA
ccggttgagggctctatcta

SEQ ID NO: 2580 - DNA, 20 bp, synthetic construct
  misc_feature 1..20: note = Synthetic construct
  source 1..20: mol_type = other DNA
cggttgagggctctatctag

SEQ ID NO: 2581 - DNA, 20 bp, synthetic construct
  misc_feature 1..20: note = Synthetic construct
  source 1..20: mol_type = other DNA
ggttgagggctctatctaga

SEQ ID NO: 2582 - DNA, 20 bp, synthetic construct
  misc_feature 1..20: note = Synthetic construct
  source 1..20: mol_type = other DNA
gttgagggctctatctagag

SEQ ID NO: 2583 - DNA, 20 bp, synthetic construct
  misc_feature 1..20: note = Synthetic construct
  source 1..20: mol_type = other DNA
ttgagggctctatctagaga

SEQ ID NO: 2584 - DNA, 20 bp, synthetic construct
  misc_feature 1..20: note = Synthetic construct
  source 1..20: mol_type = other DNA
tgagggctctatctagagag

SEQ ID NO: 2585 - DNA, 20 bp, synthetic construct
  misc_feature 1..20: note = Synthetic construct
  source 1..20: mol_type = other DNA
gagggctctatctagagagc

SEQ ID NO: 2586 - DNA, 20 bp, synthetic construct
  misc_feature 1..20: note = Synthetic construct
  source 1..20: mol_type = other DNA
agggctctatctagagagcc

SEQ ID NO: 2587 - DNA, 20 bp, synthetic construct
  misc_feature 1..20: note = Synthetic construct
  source 1..20: mol_type = other DNA
gggctctatctagagagccg

SEQ ID NO: 2588 - DNA, 20 bp, synthetic construct
  misc_feature 1..20: note = Synthetic construct
  source 1..20: mol_type = other DNA
ggctctatctagagagccgt

SEQ ID NO: 2589 - DNA, 20 bp, synthetic construct
  misc_feature 1..20: note = Synthetic construct
  source 1..20: mol_type = other DNA
gctctatctagagagccgtt

SEQ ID NO: 2590 - DNA, 20 bp, synthetic construct
  misc_feature 1..20: note = Synthetic construct
  source 1..20: mol_type = other DNA
ctctatctagagagccgttg

SEQ ID NO: 2591 - DNA, 20 bp, synthetic construct
  misc_feature 1..20: note = Synthetic construct
  source 1..20: mol_type = other DNA
tctatctagagagccgttgc

SEQ ID NO: 2592 - DNA, 20 bp, synthetic construct
  misc_feature 1..20: note = Synthetic construct
  source 1..20: mol_type = other DNA
ctatctagagagccgttgcc

SEQ ID NO: 2593 - DNA, 20 bp, synthetic construct
  misc_feature 1..20: note = Synthetic construct
  source 1..20: mol_type = other DNA
tatctagagagccgttgcct

SEQ ID NO: 2594 - DNA, 20 bp, synthetic construct
  misc_feature 1..20: note = Synthetic construct
  source 1..20: mol_type = other DNA
atctagagagccgttgcctg

SEQ ID NO: 2595 - DNA, 20 bp, synthetic construct
  misc_feature 1..20: note = Synthetic construct
  source 1..20: mol_type = other DNA
tctagagagccgttgcctga

SEQ ID NO: 2596 - DNA, 20 bp, synthetic construct
  misc_feature 1..20: note = Synthetic construct
  source 1..20: mol_type = other DNA
ctagagagccgttgcctgat

SEQ ID NO: 2597 - DNA, 20 bp, synthetic construct
  misc_feature 1..20: note = Synthetic construct
  source 1..20: mol_type = other DNA
tagagagccgttgcctgatt

SEQ ID NO: 2598 - DNA, 20 bp, synthetic construct
  misc_feature 1..20: note = Synthetic construct
  source 1..20: mol_type = other DNA
agagagccgttgcctgatta

SEQ ID NO: 2599 - DNA, 20 bp, synthetic construct
  misc_feature 1..20: note = Synthetic construct
  source 1..20: mol_type = other DNA
gagagccgttgcctgattaa

SEQ ID NO: 2600 - DNA, 20 bp, synthetic construct
  misc_feature 1..20: note = Synthetic construct
  source 1..20: mol_type = other DNA
agagccgttgcctgattaat

SEQ ID NO: 2601 - DNA, 20 bp, synthetic construct
  misc_feature 1..20: note = Synthetic construct
  source 1..20: mol_type = other DNA
gagccgttgcctgattaatg

SEQ ID NO: 2602 - DNA, 20 bp, synthetic construct
  misc_feature 1..20: note = Synthetic construct
  source 1..20: mol_type = other DNA
agccgttgcctgattaatgc

SEQ ID NO: 2603 - DNA, 20 bp, synthetic construct
  misc_feature 1..20: note = Synthetic construct
  source 1..20: mol_type = other DNA
gccgttgcctgattaatgct

SEQ ID NO: 2604 - DNA, 20 bp, synthetic construct
  misc_feature 1..20: note = Synthetic construct
  source 1..20: mol_type = other DNA
ccgttgcctgattaatgcta

SEQ ID NO: 2605 - DNA, 20 bp, synthetic construct
  misc_feature 1..20: note = Synthetic construct
  source 1..20: mol_type = other DNA
cgttgcctgattaatgctaa

SEQ ID NO: 2606 - DNA, 20 bp, synthetic construct
  misc_feature 1..20: note = Synthetic construct
  source 1..20: mol_type = other DNA
gttgcctgattaatgctaac

SEQ ID NO: 2607 - DNA, 20 bp, synthetic construct
  misc_feature 1..20: note = Synthetic construct
  source 1..20: mol_type = other DNA
ttgcctgattaatgctaacg

SEQ ID NO: 2608 - DNA, 20 bp, synthetic construct
  misc_feature 1..20: note = Synthetic construct
  source 1..20: mol_type = other DNA
tgcctgattaatgctaacgc

SEQ ID NO: 2609 - DNA, 20 bp, synthetic construct
  misc_feature 1..20: note = Synthetic construct
  source 1..20: mol_type = other DNA
gcctgattaatgctaacgca

SEQ ID NO: 2610 - DNA, 20 bp, synthetic construct
  misc_feature 1..20: note = Synthetic construct
  source 1..20: mol_type = other DNA
cctgattaatgctaacgcat

SEQ ID NO: 2611 - DNA, 20 bp, synthetic construct
  misc_feature 1..20: note = Synthetic construct
  source 1..20: mol_type = other DNA
ctgattaatgctaacgcatc

SEQ ID NO: 2612 - DNA, 20 bp, synthetic construct
  misc_feature 1..20: note = Synthetic construct
  source 1..20: mol_type = other DNA
tgattaatgctaacgcatct

SEQ ID NO: 2613 - DNA, 20 bp, synthetic construct
  misc_feature 1..20: note = Synthetic construct
  source 1..20: mol_type = other DNA
gattaatgctaacgcatcta

SEQ ID NO: 2614 - DNA, 20 bp, synthetic construct
  misc_feature 1..20: note = Synthetic construct
  source 1..20: mol_type = other DNA
attaatgctaacgcatctaa

SEQ ID NO: 2615 - DNA, 20 bp, synthetic construct
  misc_feature 1..20: note = Synthetic construct
  source 1..20: mol_type = other DNA
ttaatgctaacgcatctaag

SEQ ID NO: 2616 - DNA, 20 bp, synthetic construct
  misc_feature 1..20: note = Synthetic construct
  source 1..20: mol_type = other DNA
taatgctaacgcatctaagg

SEQ ID NO: 2617 - DNA, 20 bp, synthetic construct
  misc_feature 1..20: note = Synthetic construct
  source 1..20: mol_type = other DNA
aatgctaacgcatctaaggt

SEQ ID NO: 2618 - DNA, 20 bp, synthetic construct
  misc_feature 1..20: note = Synthetic construct
  source 1..20: mol_type = other DNA
atgctaacgcatctaaggta

SEQ ID NO: 2619 - DNA, 20 bp, synthetic construct
  misc_feature 1..20: note = Synthetic construct
  source 1..20: mol_type = other DNA
tgctaacgcatctaaggtat

SEQ ID NO: 2620 - DNA, 20 bp, synthetic construct
  misc_feature 1..20: note = Synthetic construct
  source 1..20: mol_type = other DNA
gctaacgcatctaaggtatg

SEQ ID NO: 2621 - DNA, 20 bp, synthetic construct
  misc_feature 1..20: note = Synthetic construct
  source 1..20: mol_type = other DNA
ctaacgcatctaaggtatgg

SEQ ID NO: 2622 - DNA, 20 bp, synthetic construct
  misc_feature 1..20: note = Synthetic construct
  source 1..20: mol_type = other DNA
taacgcatctaaggtatgga

SEQ ID NO: 2623 - DNA, 20 bp, synthetic construct
  misc_feature 1..20: note = Synthetic construct
  source 1..20: mol_type = other DNA
aacgcatctaaggtatggac

SEQ ID NO: 2624 - DNA, 20 bp, synthetic construct
  misc_feature 1..20: note = Synthetic construct
  source 1..20: mol_type = other DNA
acgcatctaaggtatggacc

SEQ ID NO: 2625 - DNA, 20 bp, synthetic construct
  misc_feature 1..20: note = Synthetic construct
  source 1..20: mol_type = other DNA
cgcatctaaggtatggacca

SEQ ID NO: 2626 - DNA, 20 bp, synthetic construct
  misc_feature 1..20: note = Synthetic construct
  source 1..20: mol_type = other DNA
gcatctaaggtatggaccat

SEQ ID NO: 2627 - DNA, 20 bp, synthetic construct
  misc_feature 1..20: note = Synthetic construct
  source 1..20: mol_type = other DNA
catctaaggtatggaccatc

SEQ ID NO: 2628 - DNA, 20 bp, synthetic construct
  misc_feature 1..20: note = Synthetic construct
  source 1..20: mol_type = other DNA
atctaaggtatggaccatcg

SEQ ID NO: 2629 - DNA, 20 bp, synthetic construct
  misc_feature 1..20: note = Synthetic construct
  source 1..20: mol_type = other DNA
tctaaggtatggaccatcga

SEQ ID NO: 2630 - DNA, 20 bp, synthetic construct
  misc_feature 1..20: note = Synthetic construct
  source 1..20: mol_type = other DNA
ctaaggtatggaccatcgag

SEQ ID NO: 2631 - DNA, 20 bp, synthetic construct
  misc_feature 1..20: note = Synthetic construct
  source 1..20: mol_type = other DNA
taaggtatggaccatcgaga

SEQ ID NO: 2632 - DNA, 20 bp, synthetic construct
  misc_feature 1..20: note = Synthetic construct
  source 1..20: mol_type = other DNA
aaggtatggaccatcgagaa

SEQ ID NO: 2633 - DNA, 20 bp, synthetic construct
  misc_feature 1..20: note = Synthetic construct
  source 1..20: mol_type = other DNA
aggtatggaccatcgagaaa

SEQ ID NO: 2634 - DNA, 20 bp, synthetic construct
  misc_feature 1..20: note = Synthetic construct
  source 1..20: mol_type = other DNA
ggtatggaccatcgagaaag

SEQ ID NO: 2635 - DNA, 20 bp, synthetic construct
  misc_feature 1..20: note = Synthetic construct
  source 1..20: mol_type = other DNA
gtatggaccatcgagaaagg

SEQ ID NO: 2636 - DNA, 20 bp, synthetic construct
  misc_feature 1..20: note = Synthetic construct
  source 1..20: mol_type = other DNA
tatggaccatcgagaaagga

SEQ ID NO: 2637 - DNA, 20 bp, synthetic construct
  misc_feature 1..20: note = Synthetic construct
  source 1..20: mol_type = other DNA
atggaccatcgagaaaggag

SEQ ID NO: 2638 - DNA, 20 bp, synthetic construct
  misc_feature 1..20: note = Synthetic construct
  source 1..20: mol_type = other DNA
tggaccatcgagaaaggaga

SEQ ID NO: 2639 - DNA, 20 bp, synthetic construct
  misc_feature 1..20: note = Synthetic construct
  source 1..20: mol_type = other DNA
ggaccatcgagaaaggagac

SEQ ID NO: 2640 - DNA, 20 bp, synthetic construct
  misc_feature 1..20: note = Synthetic construct
  source 1..20: mol_type = other DNA
gaccatcgagaaaggagact

SEQ ID NO: 2641 - DNA, 20 bp, synthetic construct
  misc_feature 1..20: note = Synthetic construct
  source 1..20: mol_type = other DNA
accatcgagaaaggagactt

SEQ ID NO: 2642 - DNA, 20 bp, synthetic construct
  misc_feature 1..20: note = Synthetic construct
  source 1..20: mol_type = other DNA
ccatcgagaaaggagacttt

SEQ ID NO: 2643 - DNA, 20 bp, synthetic construct
  misc_feature 1..20: note = Synthetic construct
  source 1..20: mol_type = other DNA
catcgagaaaggagacttta

SEQ ID NO: 2644 - DNA, 20 bp, synthetic construct
  misc_feature 1..20: note = Synthetic construct
  source 1..20: mol_type = other DNA
atcgagaaaggagactttac

SEQ ID NO: 2645 - DNA, 20 bp, synthetic construct
  misc_feature 1..20: note = Synthetic construct
  source 1..20: mol_type = other DNA
tcgagaaaggagactttacg

SEQ ID NO: 2646 - DNA, 20 bp, synthetic construct
  misc_feature 1..20: note = Synthetic construct
  source 1..20: mol_type = other DNA
cgagaaaggagactttacgt

SEQ ID NO: 2647 - DNA, 20 bp, synthetic construct
  misc_feature 1..20: note = Synthetic construct
  source 1..20: mol_type = other DNA
gagaaaggagactttacgta

SEQ ID NO: 2648 - DNA, 20 bp, synthetic construct
  misc_feature 1..20: note = Synthetic construct
  source 1..20: mol_type = other DNA
agaaaggagactttacgtac

SEQ ID NO: 2649 - DNA, 20 bp, synthetic construct
  misc_feature 1..20: note = Synthetic construct
  source 1..20: mol_type = other DNA
gaaaggagactttacgtacg

SEQ ID NO: 2650 - DNA, 20 bp, synthetic construct
  misc_feature 1..20: note = Synthetic construct
  source 1..20: mol_type = other DNA
aaaggagactttacgtacgc

SEQ ID NO: 2651 - DNA, 20 bp, synthetic construct
  misc_feature 1..20: note = Synthetic construct
  source 1..20: mol_type = other DNA
aaggagactttacgtacgcg

SEQ ID NO: 2652 - DNA, 20 bp, synthetic construct
  misc_feature 1..20: note = Synthetic construct
  source 1..20: mol_type = other DNA
aggagactttacgtacgcgc

SEQ ID NO: 2653 - DNA, 20 bp, synthetic construct
  misc_feature 1..20: note = Synthetic construct
  source 1..20: mol_type = other DNA
ggagactttacgtacgcgcc

SEQ ID NO: 2654 - DNA, 20 bp, synthetic construct
  misc_feature 1..20: note = Synthetic construct
  source 1..20: mol_type = other DNA
gagactttacgtacgcgcca

SEQ ID NO: 2655 - DNA, 20 bp, synthetic construct
  misc_feature 1..20: note = Synthetic construct
  source 1..20: mol_type = other DNA
agactttacgtacgcgccag

SEQ ID NO: 2656 - DNA, 20 bp, synthetic construct
  misc_feature 1..20: note = Synthetic construct
  source 1..20: mol_type = other DNA
gactttacgtacgcgccagt

SEQ ID NO: 2657 - DNA, 20 bp, synthetic construct
  misc_feature 1..20: note = Synthetic construct
  source 1..20: mol_type = other DNA
actttacgtacgcgccagtt

SEQ ID NO: 2658 - DNA, 20 bp, synthetic construct
  misc_feature 1..20: note = Synthetic construct
  source 1..20: mol_type = other DNA
ctttacgtacgcgccagttg

SEQ ID NO: 2659 - DNA, 20 bp, synthetic construct
  misc_feature 1..20: note = Synthetic construct
  source 1..20: mol_type = other DNA
tttacgtacgcgccagttgt

SEQ ID NO: 2660 - DNA, 20 bp, synthetic construct
  misc_feature 1..20: note = Synthetic construct
  source 1..20: mol_type = other DNA
ttacgtacgcgccagttgtt

SEQ ID NO: 2661 - DNA, 20 bp, synthetic construct
  misc_feature 1..20: note = Synthetic construct
  source 1..20: mol_type = other DNA
tacgtacgcgccagttgttg

SEQ ID NO: 2662 - DNA, 20 bp, synthetic construct
  misc_feature 1..20: note = Synthetic construct
  source 1..20: mol_type = other DNA
acgtacgcgccagttgttgg

SEQ ID NO: 2663 - DNA, 20 bp, synthetic construct
  misc_feature 1..20: note = Synthetic construct
  source 1..20: mol_type = other DNA
cgtacgcgccagttgttggc

SEQ ID NO: 2664 - DNA, 20 bp, synthetic construct
  misc_feature 1..20: note = Synthetic construct
  source 1..20: mol_type = other DNA
gtacgcgccagttgttggcc

SEQ ID NO: 2665 - DNA, 20 bp, synthetic construct
  misc_feature 1..20: note = Synthetic construct
  source 1..20: mol_type = other DNA
tacgcgccagttgttggcca

SEQ ID NO: 2666 - DNA, 20 bp, synthetic construct
  misc_feature 1..20: note = Synthetic construct
  source 1..20: mol_type = other DNA
acgcgccagttgttggccat

SEQ ID NO: 2667 - DNA, 20 bp, synthetic construct
  misc_feature 1..20: note = Synthetic construct
  source 1..20: mol_type = other DNA
cgcgccagttgttggccata

SEQ ID NO: 2668 - DNA, 20 bp, synthetic construct
  misc_feature 1..20: note = Synthetic construct
  source 1..20: mol_type = other DNA
gcgccagttgttggccatac

SEQ ID NO: 2669 - DNA, 20 bp, synthetic construct
  misc_feature 1..20: note = Synthetic construct
  source 1..20: mol_type = other DNA
cgccagttgttggccatacg

SEQ ID NO: 2670 - DNA, 20 bp, synthetic construct
  misc_feature 1..20: note = Synthetic construct
  source 1..20: mol_type = other DNA
gccagttgttggccatacgg

SEQ ID NO: 2671 - DNA, 20 bp, synthetic construct
  misc_feature 1..20: note = Synthetic construct
  source 1..20: mol_type = other DNA
ccagttgttggccatacgga

SEQ ID NO: 2672 - DNA, 20 bp, synthetic construct
  misc_feature 1..20: note = Synthetic construct
  source 1..20: mol_type = other DNA
cagttgttggccatacggat

SEQ ID NO: 2673 - DNA, 20 bp, synthetic construct
  misc_feature 1..20: note = Synthetic construct
  source 1..20: mol_type = other DNA
agttgttggccatacggatt

SEQ ID NO: 2674 - DNA, 20 bp, synthetic construct
  misc_feature 1..20: note = Synthetic construct
  source 1..20: mol_type = other DNA
gttgttggccatacggattg

SEQ ID NO: 2675 - DNA, 20 bp, synthetic construct
  misc_feature 1..20: note = Synthetic construct
  source 1..20: mol_type = other DNA
ttgttggccatacggattgt

SEQ ID NO: 2676 - DNA, 20 bp, synthetic construct
  misc_feature 1..20: note = Synthetic construct
  source 1..20: mol_type = other DNA
tgttggccatacggattgta

SEQ ID NO: 2677 - DNA, 20 bp, synthetic construct
  misc_feature 1..20: note = Synthetic construct
  source 1..20: mol_type = other DNA
gttggccatacggattgtac

SEQ ID NO: 2678 - DNA, 20 bp, synthetic construct
  misc_feature 1..20: note = Synthetic construct
  source 1..20: mol_type = other DNA
ttggccatacggattgtacc

SEQ ID NO: 2679 - DNA, 20 bp, synthetic construct
  misc_feature 1..20: note = Synthetic construct
  source 1..20: mol_type = other DNA
tggccatacggattgtaccc

SEQ ID NO: 2680 - DNA, 20 bp, synthetic construct
  misc_feature 1..20: note = Synthetic construct
  source 1..20: mol_type = other DNA
ggccatacggattgtacccc

SEQ ID NO: 2681 - DNA, 20 bp, synthetic construct
  misc_feature 1..20: note = Synthetic construct
  source 1..20: mol_type = other DNA
gccatacggattgtacccct

SEQ ID NO: 2682 - DNA, 20 bp, synthetic construct
  misc_feature 1..20: note = Synthetic construct
  source 1..20: mol_type = other DNA
ccatacggattgtacccctc

SEQ ID NO: 2683 - DNA, 20 bp, synthetic construct
  misc_feature 1..20: note = Synthetic construct
  source 1..20: mol_type = other DNA
catacggattgtacccctcg

SEQ ID NO: 2684 - DNA, 20 bp, synthetic construct
  misc_feature 1..20: note = Synthetic construct
  source 1..20: mol_type = other DNA
atacggattgtacccctcga

SEQ ID NO: 2685 - DNA, 20 bp, synthetic construct
  misc_feature 1..20: note = Synthetic construct
  source 1..20: mol_type = other DNA
tacggattgtacccctcgat

SEQ ID NO: 2686 - DNA, 20 bp, synthetic construct
  misc_feature 1..20: note = Synthetic construct
  source 1..20: mol_type = other DNA
acggattgtacccctcgatg

SEQ ID NO: 2687 - DNA, 20 bp, synthetic construct
  misc_feature 1..20: note = Synthetic construct
  source 1..20: mol_type = other DNA
cggattgtacccctcgatgc

SEQ ID NO: 2688 - DNA, 20 bp, synthetic construct
  misc_feature 1..20: note = Synthetic construct
  source 1..20: mol_type = other DNA
ggattgtacccctcgatgca

SEQ ID NO: 2689 - DNA, 20 bp, synthetic construct
  misc_feature 1..20: note = Synthetic construct
  source 1..20: mol_type = other DNA
gattgtacccctcgatgcat

SEQ ID NO: 2690 - DNA, 20 bp, synthetic construct
  misc_feature 1..20: note = Synthetic construct
  source 1..20: mol_type = other DNA
attgtacccctcgatgcatg

SEQ ID NO: 2691 - DNA, 20 bp, synthetic construct
  misc_feature 1..20: note = Synthetic construct
  source 1..20: mol_type = other DNA
ttgtacccctcgatgcatgg

SEQ ID NO: 2692 - DNA, 20 bp, synthetic construct
  misc_feature 1..20: note = Synthetic construct
  source 1..20: mol_type = other DNA
tgtacccctcgatgcatggc

SEQ ID NO: 2693 - DNA, 20 bp, synthetic construct
  misc_feature 1..20: note = Synthetic construct
  source 1..20: mol_type = other DNA
gtacccctcgatgcatggct

SEQ ID NO: 2694 - DNA, 20 bp, synthetic construct
  misc_feature 1..20: note = Synthetic construct
  source 1..20: mol_type = other DNA
tacccctcgatgcatggctg

SEQ ID NO: 2695 - DNA, 20 bp, synthetic construct
  misc_feature 1..20: note = Synthetic construct
  source 1..20: mol_type = other DNA
acccctcgatgcatggctga

SEQ ID NO: 2696 - DNA, 20 bp, synthetic construct
  misc_feature 1..20: note = Synthetic construct
  source 1..20: mol_type = other DNA
cccctcgatgcatggctgag

SEQ ID NO: 2697 - DNA, 20 bp, synthetic construct
  misc_feature 1..20: note = Synthetic construct
  source 1..20: mol_type = other DNA
ccctcgatgcatggctgaga

SEQ ID NO: 2698 - DNA, 20 bp, synthetic construct
  misc_feature 1..20: note = Synthetic construct
  source 1..20: mol_type = other DNA
cctcgatgcatggctgagat

SEQ ID NO: 2699 - DNA, 20 bp, synthetic construct
  misc_feature 1..20: note = Synthetic construct
  source 1..20: mol_type = other DNA
ctcgatgcatggctgagatt

SEQ ID NO: 2700 - DNA, 20 bp, synthetic construct
  misc_feature 1..20: note = Synthetic construct
  source 1..20: mol_type = other DNA
tcgatgcatggctgagattt

SEQ ID NO: 2701 - DNA, 20 bp, synthetic construct
  misc_feature 1..20: note = Synthetic construct
  source 1..20: mol_type = other DNA
cgatgcatggctgagatttg

SEQ ID NO: 2702 - DNA, 20 bp, synthetic construct
  misc_feature 1..20: note = Synthetic construct
  source 1..20: mol_type = other DNA
gatgcatggctgagatttgg

SEQ ID NO: 2703 - DNA, 20 bp, synthetic construct
  misc_feature 1..20: note = Synthetic construct
  source 1..20: mol_type = other DNA
atgcatggctgagatttggg

SEQ ID NO: 2704 - DNA, 20 bp, synthetic construct
  misc_feature 1..20: note = Synthetic construct
  source 1..20: mol_type = other DNA
tgcatggctgagatttgggc

SEQ ID NO: 2705 - DNA, 20 bp, synthetic construct
  misc_feature 1..20: note = Synthetic construct
  source 1..20: mol_type = other DNA
gcatggctgagatttgggcc

SEQ ID NO: 2706 - DNA, 20 bp, synthetic construct
  misc_feature 1..20: note = Synthetic construct
  source 1..20: mol_type = other DNA
catggctgagatttgggcct

SEQ ID NO: 2707 - DNA, 20 bp, synthetic construct
  misc_feature 1..20: note = Synthetic construct
  source 1..20: mol_type = other DNA
atggctgagatttgggcctt

SEQ ID NO: 2708 - DNA, 20 bp, synthetic construct
  misc_feature 1..20: note = Synthetic construct
  source 1..20: mol_type = other DNA
tggctgagatttgggcctta

SEQ ID NO: 2709 - DNA, 20 bp, synthetic construct
  misc_feature 1..20: note = Synthetic construct
  source 1..20: mol_type = other DNA
ggctgagatttgggccttag

SEQ ID NO: 2710 - DNA, 20 bp, synthetic construct
  misc_feature 1..20: note = Synthetic construct
  source 1..20: mol_type = other DNA
gctgagatttgggccttagc

SEQ ID NO: 2711 - DNA, 20 bp, synthetic construct
  misc_feature 1..20: note = Synthetic construct
  source 1..20: mol_type = other DNA
ctgagatttgggccttagca

SEQ ID NO: 2712 - DNA, 20 bp, synthetic construct
  misc_feature 1..20: note = Synthetic construct
  source 1..20: mol_type = other DNA
tgagatttgggccttagcag

SEQ ID NO: 2713 - DNA, 20 bp, synthetic construct
  misc_feature 1..20: note = Synthetic construct
  source 1..20: mol_type = other DNA
gagatttgggccttagcagt

SEQ ID NO: 2714 - DNA, 20 bp, synthetic construct
  misc_feature 1..20: note = Synthetic construct
  source 1..20: mol_type = other DNA
agatttgggccttagcagtg

SEQ ID NO: 2715 - DNA, 20 bp, synthetic construct
  misc_feature 1..20: note = Synthetic construct
  source 1..20: mol_type = other DNA
gatttgggccttagcagtgc

SEQ ID NO: 2716 - DNA, 20 bp, synthetic construct
  misc_feature 1..20: note = Synthetic construct
  source 1..20: mol_type = other DNA
atttgggccttagcagtgcc

SEQ ID NO: 2717 - DNA, 20 bp, synthetic construct
  misc_feature 1..20: note = Synthetic construct
  source 1..20: mol_type = other DNA
tttgggccttagcagtgccc

SEQ ID NO: 2718 - DNA, 20 bp, synthetic construct
  misc_feature 1..20: note = Synthetic construct
  source 1..20: mol_type = other DNA
ttgggccttagcagtgccct

SEQ ID NO: 2719 - DNA, 20 bp, synthetic construct
  misc_feature 1..20: note = Synthetic construct
  source 1..20: mol_type = other DNA
tgggccttagcagtgccctg

SEQ ID NO: 2720 - DNA, 20 bp, synthetic construct
  misc_feature 1..20: note = Synthetic construct
  source 1..20: mol_type = other DNA
gggccttagcagtgccctgt

SEQ ID NO: 2721 - DNA, 20 bp, synthetic construct
  misc_feature 1..20: note = Synthetic construct
  source 1..20: mol_type = other DNA
ggccttagcagtgccctgtc

SEQ ID NO: 2722 - DNA, 20 bp, synthetic construct
  misc_feature 1..20: note = Synthetic construct
  source 1..20: mol_type = other DNA
gccttagcagtgccctgtct

SEQ ID NO: 2723 - DNA, 20 bp, synthetic construct
  misc_feature 1..20: note = Synthetic construct
  source 1..20: mol_type = other DNA
ccttagcagtgccctgtctc

SEQ ID NO: 2724 - DNA, 20 bp, synthetic construct
  misc_feature 1..20: note = Synthetic construct
  source 1..20: mol_type = other DNA
cttagcagtgccctgtctct

SEQ ID NO: 2725 - DNA, 20 bp, synthetic construct
  misc_feature 1..20: note = Synthetic construct
  source 1..20: mol_type = other DNA
ttagcagtgccctgtctctc

SEQ ID NO: 2726 - DNA, 20 bp, synthetic construct
  misc_feature 1..20: note = Synthetic construct
  source 1..20: mol_type = other DNA
tagcagtgccctgtctctcc

SEQ ID NO: 2727 - DNA, 20 bp, synthetic construct
  misc_feature 1..20: note = Synthetic construct
  source 1..20: mol_type = other DNA
agcagtgccctgtctctcca

SEQ ID NO: 2728 - DNA, 20 bp, synthetic construct
  misc_feature 1..20: note = Synthetic construct
  source 1..20: mol_type = other DNA
gcagtgccctgtctctccac

SEQ ID NO: 2729 - DNA, 20 bp, synthetic construct
  misc_feature 1..20: note = Synthetic construct
  source 1..20: mol_type = other DNA
cagtgccctgtctctccaca

SEQ ID NO: 2730 - DNA, 20 bp, synthetic construct
  misc_feature 1..20: note = Synthetic construct
  source 1..20: mol_type = other DNA
agtgccctgtctctccacag

SEQ ID NO: 2731 - DNA, 20 bp, synthetic construct
  misc_feature 1..20: note = Synthetic construct
  source 1..20: mol_type = other DNA
gtgccctgtctctccacagt

SEQ ID NO: 2732 - DNA, 20 bp, synthetic construct
  misc_feature 1..20: note = Synthetic construct
  source 1..20: mol_type = other DNA
tgccctgtctctccacagtc

SEQ ID NO: 2733 - DNA, 20 bp, synthetic construct
  misc_feature 1..20: note = Synthetic construct
  source 1..20: mol_type = other DNA
gccctgtctctccacagtcc

SEQ ID NO: 2734 - DNA, 20 bp, synthetic construct
  misc_feature 1..20: note = Synthetic construct
  source 1..20: mol_type = other DNA
ccctgtctctccacagtcca

SEQ ID NO: 2735 - DNA, 20 bp, synthetic construct
  misc_feature 1..20: note = Synthetic construct
  source 1..20: mol_type = other DNA
cctgtctctccacagtccac

SEQ ID NO: 2736 - DNA, 20 bp, synthetic construct
  misc_feature 1..20: note = Synthetic construct
  source 1..20: mol_type = other DNA
ctgtctctccacagtccacc

SEQ ID NO: 2737 - DNA, 20 bp, synthetic construct
  misc_feature 1..20: note = Synthetic construct
  source 1..20: mol_type = other DNA
tgtctctccacagtccaccc

SEQ ID NO: 2738 - DNA, 20 bp, synthetic construct
  misc_feature 1..20: note = Synthetic construct
  source 1..20: mol_type = other DNA
gtctctccacagtccacccg

SEQ ID NO: 2739 - DNA, 20 bp, synthetic construct
  misc_feature 1..20: note = Synthetic construct
  source 1..20: mol_type = other DNA
tctctccacagtccacccgt

SEQ ID NO: 2740 - DNA, 20 bp, synthetic construct
  misc_feature 1..20: note = Synthetic construct
  source 1..20: mol_type = other DNA
ctctccacagtccacccgta

SEQ ID NO: 2741 - DNA, 20 bp, synthetic construct
  misc_feature 1..20: note = Synthetic construct
  source 1..20: mol_type = other DNA
tctccacagtccacccgtag

SEQ ID NO: 2742 - DNA, 20 bp, synthetic construct
  misc_feature 1..20: note = Synthetic construct
  source 1..20: mol_type = other DNA
ctccacagtccacccgtagg

SEQ ID NO: 2743 - DNA, 20 bp, synthetic construct
  misc_feature 1..20: note = Synthetic construct
  source 1..20: mol_type = other DNA
tccacagtccacccgtaggg

SEQ ID NO: 2744 - DNA, 20 bp, synthetic construct
  misc_feature 1..20: note = Synthetic construct
  source 1..20: mol_type = other DNA
ccacagtccacccgtaggga

SEQ ID NO: 2745 - DNA, 20 bp, synthetic construct
  misc_feature 1..20: note = Synthetic construct
  source 1..20: mol_type = other DNA
cacagtccacccgtagggag

SEQ ID NO: 2746 - DNA, 20 bp, synthetic construct
  misc_feature 1..20: note = Synthetic construct
  source 1..20: mol_type = other DNA
acagtccacccgtagggagc

SEQ ID NO: 2747 - DNA, 20 bp, synthetic construct
  misc_feature 1..20: note = Synthetic construct
  source 1..20: mol_type = other DNA
cagtccacccgtagggagcg

SEQ ID NO: 2748 - DNA, 20 bp, synthetic construct
  misc_feature 1..20: note = Synthetic construct
  source 1..20: mol_type = other DNA
agtccacccgtagggagcgt

SEQ ID NO: 2749 - DNA, 20 bp, synthetic construct
  misc_feature 1..20: note = Synthetic construct
  source 1..20: mol_type = other DNA
gtccacccgtagggagcgtc

SEQ ID NO: 2750 - DNA, 20 bp, synthetic construct
  misc_feature 1..20: note = Synthetic construct
  source 1..20: mol_type = other DNA
tccacccgtagggagcgtca

SEQ ID NO: 2751 - DNA, 20 bp, synthetic construct
  misc_feature 1..20: note = Synthetic construct
  source 1..20: mol_type = other DNA
ccacccgtagggagcgtcaa

SEQ ID NO: 2752 - DNA, 20 bp, synthetic construct
  misc_feature 1..20: note = Synthetic construct
  source 1..20: mol_type = other DNA
cacccgtagggagcgtcaac

SEQ ID NO: 2753 - DNA, 20 bp, synthetic construct
  misc_feature 1..20: note = Synthetic construct
  source 1..20: mol_type = other DNA
acccgtagggagcgtcaacg

SEQ ID NO: 2754 - DNA, 20 bp, synthetic construct
  misc_feature 1..20: note = Synthetic construct
  source 1..20: mol_type = other DNA
cccgtagggagcgtcaacgc

SEQ ID NO: 2755 - DNA, 20 bp, synthetic construct
  misc_feature 1..20: note = Synthetic construct
  source 1..20: mol_type = other DNA
ccgtagggagcgtcaacgct

SEQ ID NO: 2756 - DNA, 20 bp, synthetic construct
  misc_feature 1..20: note = Synthetic construct
  source 1..20: mol_type = other DNA
cgtagggagcgtcaacgctt

SEQ ID NO: 2757 - DNA, 20 bp, synthetic construct
  misc_feature 1..20: note = Synthetic construct
  source 1..20: mol_type = other DNA
gtagggagcgtcaacgctta

SEQ ID NO: 2758 - DNA, 20 bp, synthetic construct
  misc_feature 1..20: note = Synthetic construct
  source 1..20: mol_type = other DNA
tagggagcgtcaacgcttat

SEQ ID NO: 2759 - DNA, 20 bp, synthetic construct
  misc_feature 1..20: note = Synthetic construct
  source 1..20: mol_type = other DNA
agggagcgtcaacgcttatg

SEQ ID NO: 2760 - DNA, 20 bp, synthetic construct
  misc_feature 1..20: note = Synthetic construct
  source 1..20: mol_type = other DNA
gggagcgtcaacgcttatga

SEQ ID NO: 2761 - DNA, 20 bp, synthetic construct
  misc_feature 1..20: note = Synthetic construct
  source 1..20: mol_type = other DNA
ggagcgtcaacgcttatgat

SEQ ID NO: 2762 - DNA, 20 bp, synthetic construct
  misc_feature 1..20: note = Synthetic construct
  source 1..20: mol_type = other DNA
gagcgtcaacgcttatgatg

SEQ ID NO: 2763 - DNA, 20 bp, synthetic construct
  misc_feature 1..20: note = Synthetic construct
  source 1..20: mol_type = other DNA
agcgtcaacgcttatgatgg

SEQ ID NO: 2764 - DNA, 20 bp, synthetic construct
  misc_feature 1..20: note = Synthetic construct
  source 1..20: mol_type = other DNA
gcgtcaacgcttatgatgga

SEQ ID NO: 2765 - DNA, 20 bp, synthetic construct
  misc_feature 1..20: note = Synthetic construct
  source 1..20: mol_type = other DNA
cgtcaacgcttatgatggac

SEQ ID NO: 2766 - DNA, 20 bp, synthetic construct
  misc_feature 1..20: note = Synthetic construct
  source 1..20: mol_type = other DNA
gtcaacgcttatgatggact

SEQ ID NO: 2767 - DNA, 20 bp, synthetic construct
  misc_feature 1..20: note = Synthetic construct
  source 1..20: mol_type = other DNA
tcaacgcttatgatggactc

SEQ ID NO: 2768 - DNA, 20 bp, synthetic construct
  misc_feature 1..20: note = Synthetic construct
  source 1..20: mol_type = other DNA
caacgcttatgatggactca

SEQ ID NO: 2769 - DNA, 20 bp, synthetic construct
  misc_feature 1..20: note = Synthetic construct
  source 1..20: mol_type = other DNA
aacgcttatgatggactcac

SEQ ID NO: 2770 - DNA, 20 bp, synthetic construct
  misc_feature 1..20: note = Synthetic construct
  source 1..20: mol_type = other DNA
acgcttatgatggactcacc

SEQ ID NO: 2771 - DNA, 20 bp, synthetic construct
  misc_feature 1..20: note = Synthetic construct
  source 1..20: mol_type = other DNA
cgcttatgatggactcaccc

SEQ ID NO: 2772 - DNA, 20 bp, synthetic construct
  misc_feature 1..20: note = Synthetic construct
  source 1..20: mol_type = other DNA
gcttatgatggactcacccg

SEQ ID NO: 2773 - DNA, 20 bp, synthetic construct
  misc_feature 1..20: note = Synthetic construct
  source 1..20: mol_type = other DNA
cttatgatggactcacccgt

SEQ ID NO: 2774 - DNA, 20 bp, synthetic construct
  misc_feature 1..20: note = Synthetic construct
  source 1..20: mol_type = other DNA
ttatgatggactcacccgtt

SEQ ID NO: 2775 - DNA, 20 bp, synthetic construct
  misc_feature 1..20: note = Synthetic construct
  source 1..20: mol_type = other DNA
tatgatggactcacccgtta

SEQ ID NO: 2776 - DNA, 20 bp, synthetic construct
  misc_feature 1..20: note = Synthetic construct
  source 1..20: mol_type = other DNA
atgatggactcacccgttat

SEQ ID NO: 2777 - DNA, 20 bp, synthetic construct
  misc_feature 1..20: note = Synthetic construct
  source 1..20: mol_type = other DNA
tgatggactcacccgttatt

SEQ ID NO: 2778 - DNA, 20 bp, synthetic construct
  misc_feature 1..20: note = Synthetic construct
  source 1..20: mol_type = other DNA
gatggactcacccgttatta

SEQ ID NO: 2779 - DNA, 20 bp, synthetic construct
  misc_feature 1..20: note = Synthetic construct
  source 1..20: mol_type = other DNA
atggactcacccgttattac

SEQ ID NO: 2780 - DNA, 20 bp, synthetic construct
  misc_feature 1..20: note = Synthetic construct
  source 1..20: mol_type = other DNA
tggactcacccgttattacg

SEQ ID NO: 2781 - DNA, 20 bp, synthetic construct
  misc_feature 1..20: note = Synthetic construct
  source 1..20: mol_type = other DNA
ggactcacccgttattacgt

SEQ ID NO: 2782 - DNA, 20 bp, synthetic construct
  misc_feature 1..20: note = Synthetic construct
  source 1..20: mol_type = other DNA
gactcacccgttattacgtc

SEQ ID NO: 2783 - DNA, 20 bp, synthetic construct
  misc_feature 1..20: note = Synthetic construct
  source 1..20: mol_type = other DNA
actcacccgttattacgtca

SEQ ID NO: 2784 - DNA, 20 bp, synthetic construct
  misc_feature 1..20: note = Synthetic construct
  source 1..20: mol_type = other DNA
ctcacccgttattacgtcag

SEQ ID NO: 2785 - DNA, 20 bp, synthetic construct
  misc_feature 1..20: note = Synthetic construct
  source 1..20: mol_type = other DNA
tcacccgttattacgtcagt

SEQ ID NO: 2786 - DNA, 20 bp, synthetic construct
  misc_feature 1..20: note = Synthetic construct
  source 1..20: mol_type = other DNA
cacccgttattacgtcagta

SEQ ID NO: 2787 - DNA, 20 bp, synthetic construct
  misc_feature 1..20: note = Synthetic construct
  source 1..20: mol_type = other DNA
acccgttattacgtcagtaa

SEQ ID NO: 2788 - DNA, 20 bp, synthetic construct
  misc_feature 1..20: note = Synthetic construct
  source 1..20: mol_type = other DNA
cccgttattacgtcagtaac

SEQ ID NO: 2789 - DNA, 20 bp, synthetic construct
  misc_feature 1..20: note = Synthetic construct
  source 1..20: mol_type = other DNA
ccgttattacgtcagtaact

SEQ ID NO: 2790 - DNA, 20 bp, synthetic construct
  misc_feature 1..20: note = Synthetic construct
  source 1..20: mol_type = other DNA
cgttattacgtcagtaactg

SEQ ID NO: 2791 - DNA, 20 bp, synthetic construct
  misc_feature 1..20: note = Synthetic construct
  source 1..20: mol_type = other DNA
gttattacgtcagtaactgt

SEQ ID NO: 2792 - DNA, 20 bp, synthetic construct
  misc_feature 1..20: note = Synthetic construct
  source 1..20: mol_type = other DNA
ttattacgtcagtaactgtt

SEQ ID NO: 2793 - DNA, 20 bp, synthetic construct
  misc_feature 1..20: note = Synthetic construct
  source 1..20: mol_type = other DNA
tattacgtcagtaactgttc

SEQ ID NO: 2794 - DNA, 20 bp, synthetic construct
  misc_feature 1..20: note = Synthetic construct
  source 1..20: mol_type = other DNA
attacgtcagtaactgttcc

SEQ ID NO: 2795 - DNA, 20 bp, synthetic construct
  misc_feature 1..20: note = Synthetic construct
  source 1..20: mol_type = other DNA
ttacgtcagtaactgttcct

SEQ ID NO: 2796 - DNA, 20 bp, synthetic construct
  misc_feature 1..20: note = Synthetic construct
  source 1..20: mol_type = other DNA
tacgtcagtaactgttcctg

SEQ ID NO: 2797 - DNA, 20 bp, synthetic construct
  misc_feature 1..20: note = Synthetic construct
  source 1..20: mol_type = other DNA
acgtcagtaactgttcctga

SEQ ID NO: 2798 - DNA, 20 bp, synthetic construct
  misc_feature 1..20: note = Synthetic construct
  source 1..20: mol_type = other DNA
cgtcagtaactgttcctgac

SEQ ID NO: 2799 - DNA, 20 bp, synthetic construct
  misc_feature 1..20: note = Synthetic construct
  source 1..20: mol_type = other DNA
gtcagtaactgttcctgaca

SEQ ID NO: 2800 - DNA, 20 bp, synthetic construct
  misc_feature 1..20: note = Synthetic construct
  source 1..20: mol_type = other DNA
tcagtaactgttcctgacat

SEQ ID NO: 2801 - DNA, 20 bp, synthetic construct
  misc_feature 1..20: note = Synthetic construct
  source 1..20: mol_type = other DNA
cagtaactgttcctgacatg

SEQ ID NO: 2802 - DNA, 20 bp, synthetic construct
  misc_feature 1..20: note = Synthetic construct
  source 1..20: mol_type = other DNA
agtaactgttcctgacatgt

SEQ ID NO: 2803 - DNA, 20 bp, synthetic construct
  misc_feature 1..20: note = Synthetic construct
  source 1..20: mol_type = other DNA
gtaactgttcctgacatgta

SEQ ID NO: 2804 - DNA, 20 bp, synthetic construct
  misc_feature 1..20: note = Synthetic construct
  source 1..20: mol_type = other DNA
taactgttcctgacatgtag

SEQ ID NO: 2805 - DNA, 20 bp, synthetic construct
  misc_feature 1..20: note = Synthetic construct
  source 1..20: mol_type = other DNA
aactgttcctgacatgtagg

SEQ ID NO: 2806 - DNA, 20 bp, synthetic construct
  misc_feature 1..20: note = Synthetic construct
  source 1..20: mol_type = other DNA
actgttcctgacatgtagga

SEQ ID NO: 2807 - DNA, 20 bp, synthetic construct
  misc_feature 1..20: note = Synthetic construct
  source 1..20: mol_type = other DNA
ctgttcctgacatgtaggag

SEQ ID NO: 2808 - DNA, 20 bp, synthetic construct
  misc_feature 1..20: note = Synthetic construct
  source 1..20: mol_type = other DNA
tgttcctgacatgtaggagc

SEQ ID NO: 2809 - DNA, 20 bp, synthetic construct
  misc_feature 1..20: note = Synthetic construct
  source 1..20: mol_type = other DNA
gttcctgacatgtaggagca

SEQ ID NO: 2810 - DNA, 20 bp, synthetic construct
  misc_feature 1..20: note = Synthetic construct
  source 1..20: mol_type = other DNA
ttcctgacatgtaggagcat

SEQ ID NO: 2811 - DNA, 20 bp, synthetic construct
  misc_feature 1..20: note = Synthetic construct
  source 1..20: mol_type = other DNA
tcctgacatgtaggagcatc

SEQ ID NO: 2812 - DNA, 20 bp, synthetic construct
  misc_feature 1..20: note = Synthetic construct
  source 1..20: mol_type = other DNA
cctgacatgtaggagcatcc

SEQ ID NO: 2813 - DNA, 20 bp, synthetic construct
  misc_feature 1..20: note = Synthetic construct
  source 1..20: mol_type = other DNA
ctgacatgtaggagcatccc

SEQ ID NO: 2814 - DNA, 20 bp, synthetic construct
  misc_feature 1..20: note = Synthetic construct
  source 1..20: mol_type = other DNA
tgacatgtaggagcatccca

SEQ ID NO: 2815 - DNA, 20 bp, synthetic construct
  misc_feature 1..20: note = Synthetic construct
  source 1..20: mol_type = other DNA
gacatgtaggagcatcccac

SEQ ID NO: 2816 - DNA, 20 bp, synthetic construct
  misc_feature 1..20: note = Synthetic construct
  source 1..20: mol_type = other DNA
acatgtaggagcatcccacg

SEQ ID NO: 2817 - DNA, 20 bp, synthetic construct
  misc_feature 1..20: note = Synthetic construct
  source 1..20: mol_type = other DNA
catgtaggagcatcccacgg

SEQ ID NO: 2818 - DNA, 20 bp, synthetic construct
  misc_feature 1..20: note = Synthetic construct
  source 1..20: mol_type = other DNA
atgtaggagcatcccacggg

SEQ ID NO: 2819 - DNA, 20 bp, synthetic construct
  misc_feature 1..20: note = Synthetic construct
  source 1..20: mol_type = other DNA
tgtaggagcatcccacgggg

SEQ ID NO: 2820 - DNA, 20 bp, synthetic construct
  misc_feature 1..20: note = Synthetic construct
  source 1..20: mol_type = other DNA
gtaggagcatcccacggggg

SEQ ID NO: 2821 - DNA, 20 bp, synthetic construct
  misc_feature 1..20: note = Synthetic construct
  source 1..20: mol_type = other DNA
taggagcatcccacgggggc

SEQ ID NO: 2822 - DNA, 20 bp, synthetic construct
  misc_feature 1..20: note = Synthetic construct
  source 1..20: mol_type = other DNA
aggagcatcccacgggggcc

SEQ ID NO: 2823 - DNA, 20 bp, synthetic construct
  misc_feature 1..20: note = Synthetic construct
  source 1..20: mol_type = other DNA
ggagcatcccacgggggccg

SEQ ID NO: 2824 - DNA, 20 bp, synthetic construct
  misc_feature 1..20: note = Synthetic construct
  source 1..20: mol_type = other DNA
gagcatcccacgggggccgt

SEQ ID NO: 2825 - DNA, 20 bp, synthetic construct
  misc_feature 1..20: note = Synthetic construct
  source 1..20: mol_type = other DNA
agcatcccacgggggccgta

SEQ ID NO: 2826 - DNA, 20 bp, synthetic construct
  misc_feature 1..20: note = Synthetic construct
  source 1..20: mol_type = other DNA
gcatcccacgggggccgtaa

SEQ ID NO: 2827 - DNA, 20 bp, synthetic construct
  misc_feature 1..20: note = Synthetic construct
  source 1..20: mol_type = other DNA
catcccacgggggccgtaag

SEQ ID NO: 2828 - DNA, 20 bp, synthetic construct
  misc_feature 1..20: note = Synthetic construct
  source 1..20: mol_type = other DNA
atcccacgggggccgtaagg

SEQ ID NO: 2829 - DNA, 20 bp, synthetic construct
  misc_feature 1..20: note = Synthetic construct
  source 1..20: mol_type = other DNA
tcccacgggggccgtaaggc

SEQ ID NO: 2830 - DNA, 20 bp, synthetic construct
  misc_feature 1..20: note = Synthetic construct
  source 1..20: mol_type = other DNA
cccacgggggccgtaaggcc

SEQ ID NO: 2831 - DNA, 20 bp, synthetic construct
  misc_feature 1..20: note = Synthetic construct
  source 1..20: mol_type = other DNA
ccacgggggccgtaaggccc

SEQ ID NO: 2832 - DNA, 20 bp, synthetic construct
  misc_feature 1..20: note = Synthetic construct
  source 1..20: mol_type = other DNA
cacgggggccgtaaggccct

SEQ ID NO: 2833 - DNA, 20 bp, synthetic construct
  misc_feature 1..20: note = Synthetic construct
  source 1..20: mol_type = other DNA
acgggggccgtaaggccctc

SEQ ID NO: 2834 - DNA, 20 bp, synthetic construct
  misc_feature 1..20: note = Synthetic construct
  source 1..20: mol_type = other DNA
cgggggccgtaaggccctcg

SEQ ID NO: 2835 - DNA, 20 bp, synthetic construct
  misc_feature 1..20: note = Synthetic construct
  source 1..20: mol_type = other DNA
gggggccgtaaggccctcga

SEQ ID NO: 2836 - DNA, 20 bp, synthetic construct
  misc_feature 1..20: note = Synthetic construct
  source 1..20: mol_type = other DNA
ggggccgtaaggccctcgag

SEQ ID NO: 2837 - DNA, 20 bp, synthetic construct
  misc_feature 1..20: note = Synthetic construct
  source 1..20: mol_type = other DNA
gggccgtaaggccctcgagc

SEQ ID NO: 2838 - DNA, 20 bp, synthetic construct
  misc_feature 1..20: note = Synthetic construct
  source 1..20: mol_type = other DNA
ggccgtaaggccctcgagca

SEQ ID NO: 2839 - DNA, 20 bp, synthetic construct
  misc_feature 1..20: note = Synthetic construct
  source 1..20: mol_type = other DNA
gccgtaaggccctcgagcat

SEQ ID NO: 2840 - DNA, 20 bp, synthetic construct
  misc_feature 1..20: note = Synthetic construct
  source 1..20: mol_type = other DNA
ccgtaaggccctcgagcatg

SEQ ID NO: 2841 - DNA, 20 bp, synthetic construct
  misc_feature 1..20: note = Synthetic construct
  source 1..20: mol_type = other DNA
cgtaaggccctcgagcatgt

SEQ ID NO: 2842 - DNA, 20 bp, synthetic construct
  misc_feature 1..20: note = Synthetic construct
  source 1..20: mol_type = other DNA
gtaaggccctcgagcatgtt

SEQ ID NO: 2843 - DNA, 20 bp, synthetic construct
  misc_feature 1..20: note = Synthetic construct
  source 1..20: mol_type = other DNA
taaggccctcgagcatgtta

SEQ ID NO: 2844 - DNA, 20 bp, synthetic construct
  misc_feature 1..20: note = Synthetic construct
  source 1..20: mol_type = other DNA
aaggccctcgagcatgttac

SEQ ID NO: 2845 - DNA, 20 bp, synthetic construct
  misc_feature 1..20: note = Synthetic construct
  source 1..20: mol_type = other DNA
aggccctcgagcatgttacc

SEQ ID NO: 2846 - DNA, 20 bp, synthetic construct
  misc_feature 1..20: note = Synthetic construct
  source 1..20: mol_type = other DNA
ggccctcgagcatgttacct

SEQ ID NO: 2847 - DNA, 20 bp, synthetic construct
  misc_feature 1..20: note = Synthetic construct
  source 1..20: mol_type = other DNA
gccctcgagcatgttaccta

SEQ ID NO: 2848 - DNA, 20 bp, synthetic construct
  misc_feature 1..20: note = Synthetic construct
  source 1..20: mol_type = other DNA
ccctcgagcatgttacctac

SEQ ID NO: 2849 - DNA, 20 bp, synthetic construct
  misc_feature 1..20: note = Synthetic construct
  source 1..20: mol_type = other DNA
cctcgagcatgttacctaca

SEQ ID NO: 2850 - DNA, 20 bp, synthetic construct
  misc_feature 1..20: note = Synthetic construct
  source 1..20: mol_type = other DNA
ctcgagcatgttacctacag

SEQ ID NO: 2851 - DNA, 20 bp, synthetic construct
  misc_feature 1..20: note = Synthetic construct
  source 1..20: mol_type = other DNA
tcgagcatgttacctacagg

SEQ ID NO: 2852 - DNA, 20 bp, synthetic construct
  misc_feature 1..20: note = Synthetic construct
  source 1..20: mol_type = other DNA
cgagcatgttacctacaggt

SEQ ID NO: 2853 - DNA, 20 bp, synthetic construct
  misc_feature 1..20: note = Synthetic construct
  source 1..20: mol_type = other DNA
gagcatgttacctacaggta

SEQ ID NO: 2854 - DNA, 20 bp, synthetic construct
  misc_feature 1..20: note = Synthetic construct
  source 1..20: mol_type = other DNA
agcatgttacctacaggtag

SEQ ID NO: 2855 - DNA, 20 bp, synthetic construct
  misc_feature 1..20: note = Synthetic construct
  source 1..20: mol_type = other DNA
gcatgttacctacaggtagg

SEQ ID NO: 2856 - DNA, 20 bp, synthetic construct
  misc_feature 1..20: note = Synthetic construct
  source 1..20: mol_type = other DNA
catgttacctacaggtagga

SEQ ID NO: 2857 - DNA, 20 bp, synthetic construct
  misc_feature 1..20: note = Synthetic construct
  source 1..20: mol_type = other DNA
atgttacctacaggtaggag

SEQ ID NO: 2858 - DNA, 20 bp, synthetic construct
  misc_feature 1..20: note = Synthetic construct
  source 1..20: mol_type = other DNA
tgttacctacaggtaggagc

SEQ ID NO: 2859 - DNA, 20 bp, synthetic construct
  misc_feature 1..20: note = Synthetic construct
  source 1..20: mol_type = other DNA
gttacctacaggtaggagcc

SEQ ID NO: 2860 - DNA, 20 bp, synthetic construct
  misc_feature 1..20: note = Synthetic construct
  source 1..20: mol_type = other DNA
ttacctacaggtaggagcca

SEQ ID NO: 2861 - DNA, 20 bp, synthetic construct
  misc_feature 1..20: note = Synthetic construct
  source 1..20: mol_type = other DNA
tacctacaggtaggagccag

SEQ ID NO: 2862 - DNA, 20 bp, synthetic construct
  misc_feature 1..20: note = Synthetic construct
  source 1..20: mol_type = other DNA
acctacaggtaggagccagt

SEQ ID NO: 2863 - DNA, 20 bp, synthetic construct
  misc_feature 1..20: note = Synthetic construct
  source 1..20: mol_type = other DNA
cctacaggtaggagccagtc

SEQ ID NO: 2864 - DNA, 20 bp, synthetic construct
  misc_feature 1..20: note = Synthetic construct
  source 1..20: mol_type = other DNA
ctacaggtaggagccagtcg

SEQ ID NO: 2865 - DNA, 20 bp, synthetic construct
  misc_feature 1..20: note = Synthetic construct
  source 1..20: mol_type = other DNA
tacaggtaggagccagtcga

SEQ ID NO: 2866 - DNA, 20 bp, synthetic construct
  misc_feature 1..20: note = Synthetic construct
  source 1..20: mol_type = other DNA
acaggtaggagccagtcgac

SEQ ID NO: 2867 - DNA, 20 bp, synthetic construct
  misc_feature 1..20: note = Synthetic construct
  source 1..20: mol_type = other DNA
caggtaggagccagtcgaca

SEQ ID NO: 2868 - DNA, 20 bp, synthetic construct
  misc_feature 1..20: note = Synthetic construct
  source 1..20: mol_type = other DNA
aggtaggagccagtcgacaa

SEQ ID NO: 2869 - DNA, 20 bp, synthetic construct
  misc_feature 1..20: note = Synthetic construct
  source 1..20: mol_type = other DNA
ggtaggagccagtcgacaac

SEQ ID NO: 2870 - DNA, 20 bp, synthetic construct
  misc_feature 1..20: note = Synthetic construct
  source 1..20: mol_type = other DNA
gtaggagccagtcgacaacg

SEQ ID NO: 2871 - DNA, 20 bp, synthetic construct
  misc_feature 1..20: note = Synthetic construct
  source 1..20: mol_type = other DNA
taggagccagtcgacaacga

SEQ ID NO: 2872 - DNA, 20 bp, synthetic construct
  misc_feature 1..20: note = Synthetic construct
  source 1..20: mol_type = other DNA
aggagccagtcgacaacgaa

SEQ ID NO: 2873 - DNA, 20 bp, synthetic construct
  misc_feature 1..20: note = Synthetic construct
  source 1..20: mol_type = other DNA
ggagccagtcgacaacgaat

SEQ ID NO: 2874 - DNA, 20 bp, synthetic construct
  misc_feature 1..20: note = Synthetic construct
  source 1..20: mol_type = other DNA
gagccagtcgacaacgaatg

SEQ ID NO: 2875 - DNA, 20 bp, synthetic construct
  misc_feature 1..20: note = Synthetic construct
  source 1..20: mol_type = other DNA
agccagtcgacaacgaatga

SEQ ID NO: 2876 - DNA, 20 bp, synthetic construct
  misc_feature 1..20: note = Synthetic construct
  source 1..20: mol_type = other DNA
gccagtcgacaacgaatgag

SEQ ID NO: 2877 - DNA, 20 bp, synthetic construct
  misc_feature 1..20: note = Synthetic construct
  source 1..20: mol_type = other DNA
ccagtcgacaacgaatgaga

SEQ ID NO: 2878 - DNA, 20 bp, synthetic construct
  misc_feature 1..20: note = Synthetic construct
  source 1..20: mol_type = other DNA
cagtcgacaacgaatgagaa

SEQ ID NO: 2879 - DNA, 20 bp, synthetic construct
  misc_feature 1..20: note = Synthetic construct
  source 1..20: mol_type = other DNA
agtcgacaacgaatgagaaa

SEQ ID NO: 2880 - DNA, 20 bp, synthetic construct
  misc_feature 1..20: note = Synthetic construct
  source 1..20: mol_type = other DNA
gtcgacaacgaatgagaaag

SEQ ID NO: 2881 - DNA, 20 bp, synthetic construct
  misc_feature 1..20: note = Synthetic construct
  source 1..20: mol_type = other DNA
tcgacaacgaatgagaaagg

SEQ ID NO: 2882 - DNA, 20 bp, synthetic construct
  misc_feature 1..20: note = Synthetic construct
  source 1..20: mol_type = other DNA
cgacaacgaatgagaaaggc

SEQ ID NO: 2883 - DNA, 20 bp, synthetic construct
  misc_feature 1..20: note = Synthetic construct
  source 1..20: mol_type = other DNA
gacaacgaatgagaaaggca

SEQ ID NO: 2884 - DNA, 20 bp, synthetic construct
  misc_feature 1..20: note = Synthetic construct
  source 1..20: mol_type = other DNA
acaacgaatgagaaaggcac

SEQ ID NO: 2885 - DNA, 20 bp, synthetic construct
  misc_feature 1..20: note = Synthetic construct
  source 1..20: mol_type = other DNA
caacgaatgagaaaggcacc

SEQ ID NO: 2886 - DNA, 20 bp, synthetic construct
  misc_feature 1..20: note = Synthetic construct
  source 1..20: mol_type = other DNA
aacgaatgagaaaggcacct

SEQ ID NO: 2887 - DNA, 20 bp, synthetic construct
  misc_feature 1..20: note = Synthetic construct
  source 1..20: mol_type = other DNA
acgaatgagaaaggcacctt

SEQ ID NO: 2888 - DNA, 20 bp, synthetic construct
  misc_feature 1..20: note = Synthetic construct
  source 1..20: mol_type = other DNA
cgaatgagaaaggcaccttt

SEQ ID NO: 2889 - DNA, 20 bp, synthetic construct
  misc_feature 1..20: note = Synthetic construct
  source 1..20: mol_type = other DNA
gaatgagaaaggcacctttt

SEQ ID NO: 2890 - DNA, 20 bp, synthetic construct
  misc_feature 1..20: note = Synthetic construct
  source 1..20: mol_type = other DNA
aatgagaaaggcaccttttc

SEQ ID NO: 2891 - DNA, 20 bp, synthetic construct
  misc_feature 1..20: note = Synthetic construct
  source 1..20: mol_type = other DNA
atgagaaaggcaccttttcc

SEQ ID NO: 2892 - DNA, 20 bp, synthetic construct
  misc_feature 1..20: note = Synthetic construct
  source 1..20: mol_type = other DNA
tgagaaaggcaccttttccc

SEQ ID NO: 2893 - DNA, 20 bp, synthetic construct
  misc_feature 1..20: note = Synthetic construct
  source 1..20: mol_type = other DNA
gagaaaggcaccttttccca

SEQ ID NO: 2894 - DNA, 20 bp, synthetic construct
  misc_feature 1..20: note = Synthetic construct
  source 1..20: mol_type = other DNA
agaaaggcaccttttcccac

SEQ ID NO: 2895 - DNA, 20 bp, synthetic construct
  misc_feature 1..20: note = Synthetic construct
  source 1..20: mol_type = other DNA
gaaaggcaccttttcccaca

SEQ ID NO: 2896 - DNA, 20 bp, synthetic construct
  misc_feature 1..20: note = Synthetic construct
  source 1..20: mol_type = other DNA
aaaggcaccttttcccacac

SEQ ID NO: 2897 - DNA, 20 bp, synthetic construct
  misc_feature 1..20: note = Synthetic construct
  source 1..20: mol_type = other DNA
aaggcaccttttcccacact

SEQ ID NO: 2898 - DNA, 20 bp, synthetic construct
  misc_feature 1..20: note = Synthetic construct
  source 1..20: mol_type = other DNA
aggcaccttttcccacacta

SEQ ID NO: 2899 - DNA, 20 bp, synthetic construct
  misc_feature 1..20: note = Synthetic construct
  source 1..20: mol_type = other DNA
ggcaccttttcccacactat

SEQ ID NO: 2900 - DNA, 20 bp, synthetic construct
  misc_feature 1..20: note = Synthetic construct
  source 1..20: mol_type = other DNA
gcaccttttcccacactata

SEQ ID NO: 2901 - DNA, 20 bp, synthetic construct
  misc_feature 1..20: note = Synthetic construct
  source 1..20: mol_type = other DNA
caccttttcccacactatac

SEQ ID NO: 2902 - DNA, 20 bp, synthetic construct
  misc_feature 1..20: note = Synthetic construct
  source 1..20: mol_type = other DNA
accttttcccacactatacc

SEQ ID NO: 2903 - DNA, 20 bp, synthetic construct
  misc_feature 1..20: note = Synthetic construct
  source 1..20: mol_type = other DNA
ccttttcccacactatacct

SEQ ID NO: 2904 - DNA, 20 bp, synthetic construct
  misc_feature 1..20: note = Synthetic construct
  source 1..20: mol_type = other DNA
cttttcccacactataccta

SEQ ID NO: 2905 - DNA, 20 bp, synthetic construct
  misc_feature 1..20: note = Synthetic construct
  source 1..20: mol_type = other DNA
ttttcccacactatacctag

SEQ ID NO: 2906 - DNA, 20 bp, synthetic construct
  misc_feature 1..20: note = Synthetic construct
  source 1..20: mol_type = other DNA
tttcccacactatacctagt

SEQ ID NO: 2907 - DNA, 20 bp, synthetic construct
  misc_feature 1..20: note = Synthetic construct
  source 1..20: mol_type = other DNA
ttcccacactatacctagtg

SEQ ID NO: 2908 - DNA, 20 bp, synthetic construct
  misc_feature 1..20: note = Synthetic construct
  source 1..20: mol_type = other DNA
tcccacactatacctagtgg

SEQ ID NO: 2909 - DNA, 20 bp, synthetic construct
  misc_feature 1..20: note = Synthetic construct
  source 1..20: mol_type = other DNA
cccacactatacctagtggg

SEQ ID NO: 2910 - DNA, 20 bp, synthetic construct
  misc_feature 1..20: note = Synthetic construct
  source 1..20: mol_type = other DNA
ccacactatacctagtgggt

SEQ ID NO: 2911 - DNA, 20 bp, synthetic construct
  misc_feature 1..20: note = Synthetic construct
  source 1..20: mol_type = other DNA
cacactatacctagtgggtt

SEQ ID NO: 2912 - DNA, 20 bp, synthetic construct
  misc_feature 1..20: note = Synthetic construct
  source 1..20: mol_type = other DNA
acactatacctagtgggttc

SEQ ID NO: 2913 - DNA, 20 bp, synthetic construct
  misc_feature 1..20: note = Synthetic construct
  source 1..20: mol_type = other DNA
cactatacctagtgggttca

SEQ ID NO: 2914 - DNA, 20 bp, synthetic construct
  misc_feature 1..20: note = Synthetic construct
  source 1..20: mol_type = other DNA
actatacctagtgggttcaa

SEQ ID NO: 2915 - DNA, 20 bp, synthetic construct
  misc_feature 1..20: note = Synthetic construct
  source 1..20: mol_type = other DNA
ctatacctagtgggttcaag

SEQ ID NO: 2916 - DNA, 20 bp, synthetic construct
  misc_feature 1..20: note = Synthetic construct
  source 1..20: mol_type = other DNA
tatacctagtgggttcaaga

SEQ ID NO: 2917 - DNA, 20 bp, synthetic construct
  misc_feature 1..20: note = Synthetic construct
  source 1..20: mol_type = other DNA
atacctagtgggttcaagat

SEQ ID NO: 2918 - DNA, 20 bp, synthetic construct
  misc_feature 1..20: note = Synthetic construct
  source 1..20: mol_type = other DNA
tacctagtgggttcaagata

SEQ ID NO: 2919 - DNA, 20 bp, synthetic construct
  misc_feature 1..20: note = Synthetic construct
  source 1..20: mol_type = other DNA
acctagtgggttcaagatac

SEQ ID NO: 2920 - DNA, 20 bp, synthetic construct
  misc_feature 1..20: note = Synthetic construct
  source 1..20: mol_type = other DNA
cctagtgggttcaagatacc

SEQ ID NO: 2921 - DNA, 20 bp, synthetic construct
  misc_feature 1..20: note = Synthetic construct
  source 1..20: mol_type = other DNA
ctagtgggttcaagatacct

SEQ ID NO: 2922 - DNA, 20 bp, synthetic construct
  misc_feature 1..20: note = Synthetic construct
  source 1..20: mol_type = other DNA
tagtgggttcaagataccta

SEQ ID NO: 2923 - DNA, 20 bp, synthetic construct
  misc_feature 1..20: note = Synthetic construct
  source 1..20: mol_type = other DNA
agtgggttcaagatacctag

SEQ ID NO: 2924 - DNA, 20 bp, synthetic construct
  misc_feature 1..20: note = Synthetic construct
  source 1..20: mol_type = other DNA
gtgggttcaagatacctaga

SEQ ID NO: 2925 - DNA, 20 bp, synthetic construct
  misc_feature 1..20: note = Synthetic construct
  source 1..20: mol_type = other DNA
tgggttcaagatacctagag

SEQ ID NO: 2926 - DNA, 20 bp, synthetic construct
  misc_feature 1..20: note = Synthetic construct
  source 1..20: mol_type = other DNA
gggttcaagatacctagaga

SEQ ID NO: 2927 - DNA, 20 bp, synthetic construct
  misc_feature 1..20: note = Synthetic construct
  source 1..20: mol_type = other DNA
ggttcaagatacctagagac

SEQ ID NO: 2928 - DNA, 20 bp, synthetic construct
  misc_feature 1..20: note = Synthetic construct
  source 1..20: mol_type = other DNA
gttcaagatacctagagacg

SEQ ID NO: 2929 - DNA, 20 bp, synthetic construct
  misc_feature 1..20: note = Synthetic construct
  source 1..20: mol_type = other DNA
ttcaagatacctagagacga

SEQ ID NO: 2930 - DNA, 20 bp, synthetic construct
  misc_feature 1..20: note = Synthetic construct
  source 1..20: mol_type = other DNA
tcaagatacctagagacgac

SEQ ID NO: 2931 - DNA, 20 bp, synthetic construct
  misc_feature 1..20: note = Synthetic construct
  source 1..20: mol_type = other DNA
caagatacctagagacgaca

SEQ ID NO: 2932 - DNA, 20 bp, synthetic construct
  misc_feature 1..20: note = Synthetic construct
  source 1..20: mol_type = other DNA
aagatacctagagacgacaa

SEQ ID NO: 2933 - DNA, 20 bp, synthetic construct
  misc_feature 1..20: note = Synthetic construct
  source 1..20: mol_type = other DNA
agatacctagagacgacaac

SEQ ID NO: 2934 - DNA, 20 bp, synthetic construct
  misc_feature 1..20: note = Synthetic construct
  source 1..20: mol_type = other DNA
gatacctagagacgacaacc

SEQ ID NO: 2935 - DNA, 20 bp, synthetic construct
  misc_feature 1..20: note = Synthetic construct
  source 1..20: mol_type = other DNA
atacctagagacgacaacca

SEQ ID NO: 2936 - DNA, 20 bp, synthetic construct
  misc_feature 1..20: note = Synthetic construct
  source 1..20: mol_type = other DNA
tacctagagacgacaaccat

SEQ ID NO: 2937 - DNA, 20 bp, synthetic construct
  misc_feature 1..20: note = Synthetic construct
  source 1..20: mol_type = other DNA
acctagagacgacaaccatg

SEQ ID NO: 2938 - DNA, 20 bp, synthetic construct
  misc_feature 1..20: note = Synthetic construct
  source 1..20: mol_type = other DNA
cctagagacgacaaccatgc

SEQ ID NO: 2939 - DNA, 20 bp, synthetic construct
  misc_feature 1..20: note = Synthetic construct
  source 1..20: mol_type = other DNA
ctagagacgacaaccatgcc

SEQ ID NO: 2940 - DNA, 20 bp, synthetic construct
  misc_feature 1..20: note = Synthetic construct
  source 1..20: mol_type = other DNA
tagagacgacaaccatgcca

SEQ ID NO: 2941 - DNA, 20 bp, synthetic construct
  misc_feature 1..20: note = Synthetic construct
  source 1..20: mol_type = other DNA
agagacgacaaccatgccaa

SEQ ID NO: 2942 - DNA, 20 bp, synthetic construct
  misc_feature 1..20: note = Synthetic construct
  source 1..20: mol_type = other DNA
gagacgacaaccatgccaaa

SEQ ID NO: 2943 - DNA, 20 bp, synthetic construct
  misc_feature 1..20: note = Synthetic construct
  source 1..20: mol_type = other DNA
agacgacaaccatgccaaac

SEQ ID NO: 2944 - DNA, 20 bp, synthetic construct
  misc_feature 1..20: note = Synthetic construct
  source 1..20: mol_type = other DNA
gacgacaaccatgccaaacg

SEQ ID NO: 2945 - DNA, 20 bp, synthetic construct
  misc_feature 1..20: note = Synthetic construct
  source 1..20: mol_type = other DNA
acgacaaccatgccaaacgt

SEQ ID NO: 2946 - DNA, 20 bp, synthetic construct
  misc_feature 1..20: note = Synthetic construct
  source 1..20: mol_type = other DNA
cgacaaccatgccaaacgtg

SEQ ID NO: 2947 - DNA, 20 bp, synthetic construct
  misc_feature 1..20: note = Synthetic construct
  source 1..20: mol_type = other DNA
gacaaccatgccaaacgtgc

SEQ ID NO: 2948 - DNA, 20 bp, synthetic construct
  misc_feature 1..20: note = Synthetic construct
  source 1..20: mol_type = other DNA
acaaccatgccaaacgtgca

SEQ ID NO: 2949 - DNA, 20 bp, synthetic construct
  misc_feature 1..20: note = Synthetic construct
  source 1..20: mol_type = other DNA
caaccatgccaaacgtgcat

SEQ ID NO: 2950 - DNA, 20 bp, synthetic construct
  misc_feature 1..20: note = Synthetic construct
  source 1..20: mol_type = other DNA
aaccatgccaaacgtgcatc

SEQ ID NO: 2951 - DNA, 20 bp, synthetic construct
  misc_feature 1..20: note = Synthetic construct
  source 1..20: mol_type = other DNA
accatgccaaacgtgcatcg

SEQ ID NO: 2952 - DNA, 20 bp, synthetic construct
  misc_feature 1..20: note = Synthetic construct
  source 1..20: mol_type = other DNA
ccatgccaaacgtgcatcgt

SEQ ID NO: 2953 - DNA, 20 bp, synthetic construct
  misc_feature 1..20: note = Synthetic construct
  source 1..20: mol_type = other DNA
catgccaaacgtgcatcgtt

SEQ ID NO: 2954 - DNA, 20 bp, synthetic construct
  misc_feature 1..20: note = Synthetic construct
  source 1..20: mol_type = other DNA
atgccaaacgtgcatcgttt

SEQ ID NO: 2955 - DNA, 20 bp, synthetic construct
  misc_feature 1..20: note = Synthetic construct
  source 1..20: mol_type = other DNA
tgccaaacgtgcatcgttta

SEQ ID NO: 2956 - DNA, 20 bp, synthetic construct
  misc_feature 1..20: note = Synthetic construct
  source 1..20: mol_type = other DNA
gccaaacgtgcatcgtttat

SEQ ID NO: 2957 - DNA, 20 bp, synthetic construct
  misc_feature 1..20: note = Synthetic construct
  source 1..20: mol_type = other DNA
ccaaacgtgcatcgtttatg

SEQ ID NO: 2958 - DNA, 20 bp, synthetic construct
  misc_feature 1..20: note = Synthetic construct
  source 1..20: mol_type = other DNA
caaacgtgcatcgtttatgt

SEQ ID NO: 2959 - DNA, 20 bp, synthetic construct
  misc_feature 1..20: note = Synthetic construct
  source 1..20: mol_type = other DNA
aaacgtgcatcgtttatgta

SEQ ID NO: 2960 - DNA, 20 bp, synthetic construct
  misc_feature 1..20: note = Synthetic construct
  source 1..20: mol_type = other DNA
aacgtgcatcgtttatgtaa

SEQ ID NO: 2961 - DNA, 20 bp, synthetic construct
  misc_feature 1..20: note = Synthetic construct
  source 1..20: mol_type = other DNA
acgtgcatcgtttatgtaaa

SEQ ID NO: 2962 - DNA, 20 bp, synthetic construct
  misc_feature 1..20: note = Synthetic construct
  source 1..20: mol_type = other DNA
cgtgcatcgtttatgtaaaa

SEQ ID NO: 2963 - DNA, 20 bp, synthetic construct
  misc_feature 1..20: note = Synthetic construct
  source 1..20: mol_type = other DNA
gtgcatcgtttatgtaaaac

SEQ ID NO: 2964 - DNA, 20 bp, synthetic construct
  misc_feature 1..20: note = Synthetic construct
  source 1..20: mol_type = other DNA
tgcatcgtttatgtaaaacc

SEQ ID NO: 2965 - DNA, 20 bp, synthetic construct
  misc_feature 1..20: note = Synthetic construct
  source 1..20: mol_type = other DNA
gcatcgtttatgtaaaacca

SEQ ID NO: 2966 - DNA, 20 bp, synthetic construct
  misc_feature 1..20: note = Synthetic construct
  source 1..20: mol_type = other DNA
catcgtttatgtaaaaccat

SEQ ID NO: 2967 - DNA, 20 bp, synthetic construct
  misc_feature 1..20: note = Synthetic construct
  source 1..20: mol_type = other DNA
atcgtttatgtaaaaccata

SEQ ID NO: 2968 - DNA, 20 bp, synthetic construct
  misc_feature 1..20: note = Synthetic construct
  source 1..20: mol_type = other DNA
tcgtttatgtaaaaccatat

SEQ ID NO: 2969 - DNA, 20 bp, synthetic construct
  misc_feature 1..20: note = Synthetic construct
  source 1..20: mol_type = other DNA
cgtttatgtaaaaccatatc

SEQ ID NO: 2970 - DNA, 20 bp, synthetic construct
  misc_feature 1..20: note = Synthetic construct
  source 1..20: mol_type = other DNA
gtttatgtaaaaccatatca

SEQ ID NO: 2971 - DNA, 20 bp, synthetic construct
  misc_feature 1..20: note = Synthetic construct
  source 1..20: mol_type = other DNA
tttatgtaaaaccatatcac

SEQ ID NO: 2972 - DNA, 20 bp, synthetic construct
  misc_feature 1..20: note = Synthetic construct
  source 1..20: mol_type = other DNA
ttatgtaaaaccatatcacg

SEQ ID NO: 2973 - DNA, 20 bp, synthetic construct
  misc_feature 1..20: note = Synthetic construct
  source 1..20: mol_type = other DNA
tatgtaaaaccatatcacga

SEQ ID NO: 2974 - DNA, 20 bp, synthetic construct
  misc_feature 1..20: note = Synthetic construct
  source 1..20: mol_type = other DNA
atgtaaaaccatatcacgat

SEQ ID NO: 2975 - DNA, 20 bp, synthetic construct
  misc_feature 1..20: note = Synthetic construct
  source 1..20: mol_type = other DNA
tgtaaaaccatatcacgata

SEQ ID NO: 2976 - DNA, 20 bp, synthetic construct
  misc_feature 1..20: note = Synthetic construct
  source 1..20: mol_type = other DNA
gtaaaaccatatcacgatac

SEQ ID NO: 2977 - DNA, 20 bp, synthetic construct
  misc_feature 1..20: note = Synthetic construct
  source 1..20: mol_type = other DNA
taaaaccatatcacgatacg

SEQ ID NO: 2978 - DNA, 20 bp, synthetic construct
  misc_feature 1..20: note = Synthetic construct
  source 1..20: mol_type = other DNA
aaaaccatatcacgatacgt

SEQ ID NO: 2979 - DNA, 20 bp, synthetic construct
  misc_feature 1..20: note = Synthetic construct
  source 1..20: mol_type = other DNA
aaaccatatcacgatacgtc

SEQ ID NO: 2980 - DNA, 20 bp, synthetic construct
  misc_feature 1..20: note = Synthetic construct
  source 1..20: mol_type = other DNA
aaccatatcacgatacgtcg

SEQ ID NO: 2981 - DNA, 20 bp, synthetic construct
  misc_feature 1..20: note = Synthetic construct
  source 1..20: mol_type = other DNA
accatatcacgatacgtcgc

SEQ ID NO: 2982 - DNA, 20 bp, synthetic construct
  misc_feature 1..20: note = Synthetic construct
  source 1..20: mol_type = other DNA
ccatatcacgatacgtcgcg

SEQ ID NO: 2983 - DNA, 20 bp, synthetic construct
  misc_feature 1..20: note = Synthetic construct
  source 1..20: mol_type = other DNA
catatcacgatacgtcgcga

SEQ ID NO: 2984 - DNA, 20 bp, synthetic construct
  misc_feature 1..20: note = Synthetic construct
  source 1..20: mol_type = other DNA
atatcacgatacgtcgcgat

SEQ ID NO: 2985 - DNA, 20 bp, synthetic construct
  misc_feature 1..20: note = Synthetic construct
  source 1..20: mol_type = other DNA
tatcacgatacgtcgcgata

SEQ ID NO: 2986 - DNA, 20 bp, synthetic construct
  misc_feature 1..20: note = Synthetic construct
  source 1..20: mol_type = other DNA
atcacgatacgtcgcgatat

SEQ ID NO: 2987 - DNA, 20 bp, synthetic construct
  misc_feature 1..20: note = Synthetic construct
  source 1..20: mol_type = other DNA
tcacgatacgtcgcgatatg

SEQ ID NO: 2988 - DNA, 20 bp, synthetic construct
  misc_feature 1..20: note = Synthetic construct
  source 1..20: mol_type = other DNA
cacgatacgtcgcgatatgt

SEQ ID NO: 2989 - DNA, 20 bp, synthetic construct
  misc_feature 1..20: note = Synthetic construct
  source 1..20: mol_type = other DNA
acgatacgtcgcgatatgtt

SEQ ID NO: 2990 - DNA, 20 bp, synthetic construct
  misc_feature 1..20: note = Synthetic construct
  source 1..20: mol_type = other DNA
cgatacgtcgcgatatgttg

SEQ ID NO: 2991 - DNA, 20 bp, synthetic construct
  misc_feature 1..20: note = Synthetic construct
  source 1..20: mol_type = other DNA
gatacgtcgcgatatgttgc

SEQ ID NO: 2992 - DNA, 20 bp, synthetic construct
  misc_feature 1..20: note = Synthetic construct
  source 1..20: mol_type = other DNA
atacgtcgcgatatgttgca

SEQ ID NO: 2993 - DNA, 20 bp, synthetic construct
  misc_feature 1..20: note = Synthetic construct
  source 1..20: mol_type = other DNA
tacgtcgcgatatgttgcac

SEQ ID NO: 2994 - DNA, 20 bp, synthetic construct
  misc_feature 1..20: note = Synthetic construct
  source 1..20: mol_type = other DNA
acgtcgcgatatgttgcacg

SEQ ID NO: 2995 - DNA, 20 bp, synthetic construct
  misc_feature 1..20: note = Synthetic construct
  source 1..20: mol_type = other DNA
cgtcgcgatatgttgcacgt

SEQ ID NO: 2996 - DNA, 20 bp, synthetic construct
  misc_feature 1..20: note = Synthetic construct
  source 1..20: mol_type = other DNA
gtcgcgatatgttgcacgtt

SEQ ID NO: 2997 - DNA, 20 bp, synthetic construct
  misc_feature 1..20: note = Synthetic construct
  source 1..20: mol_type = other DNA
tcgcgatatgttgcacgttg

SEQ ID NO: 2998 - DNA, 20 bp, synthetic construct
  misc_feature 1..20: note = Synthetic construct
  source 1..20: mol_type = other DNA
cgcgatatgttgcacgttgt

SEQ ID NO: 2999 - DNA, 20 bp, synthetic construct
  misc_feature 1..20: note = Synthetic construct
  source 1..20: mol_type = other DNA
gcgatatgttgcacgttgtc

SEQ ID NO: 3000 - DNA, 20 bp, synthetic construct
  misc_feature 1..20: note = Synthetic construct
  source 1..20: mol_type = other DNA
cgatatgttgcacgttgtct

SEQ ID NO: 3001 - DNA, 20 bp, synthetic construct
  misc_feature 1..20: note = Synthetic construct
  source 1..20: mol_type = other DNA
gatatgttgcacgttgtctg

SEQ ID NO: 3002 - DNA, 20 bp, synthetic construct
  misc_feature 1..20: note = Synthetic construct
  source 1..20: mol_type = other DNA
atatgttgcacgttgtctgg

SEQ ID NO: 3003 - DNA, 20 bp, synthetic construct
  misc_feature 1..20: note = Synthetic construct
  source 1..20: mol_type = other DNA
tatgttgcacgttgtctgga

SEQ ID NO: 3004 - DNA, 20 bp, synthetic construct
  misc_feature 1..20: note = Synthetic construct
  source 1..20: mol_type = other DNA
atgttgcacgttgtctggaa

SEQ ID NO: 3005 - DNA, 20 bp, synthetic construct
  misc_feature 1..20: note = Synthetic construct
  source 1..20: mol_type = other DNA
tgttgcacgttgtctggaag

SEQ ID NO: 3006 - DNA, 20 bp, synthetic construct
  misc_feature 1..20: note = Synthetic construct
  source 1..20: mol_type = other DNA
gttgcacgttgtctggaagt

SEQ ID NO: 3007 - DNA, 20 bp, synthetic construct
  misc_feature 1..20: note = Synthetic construct
  source 1..20: mol_type = other DNA
ttgcacgttgtctggaagtt

SEQ ID NO: 3008 - DNA, 20 bp, synthetic construct
  misc_feature 1..20: note = Synthetic construct
  source 1..20: mol_type = other DNA
tgcacgttgtctggaagttt

SEQ ID NO: 3009 - DNA, 20 bp, synthetic construct
  misc_feature 1..20: note = Synthetic construct
  source 1..20: mol_type = other DNA
gcacgttgtctggaagtttg

SEQ ID NO: 3010 - DNA, 20 bp, synthetic construct
  misc_feature 1..20: note = Synthetic construct
  source 1..20: mol_type = other DNA
cacgttgtctggaagtttgc

SEQ ID NO: 3011 - DNA, 20 bp, synthetic construct
  misc_feature 1..20: note = Synthetic construct
  source 1..20: mol_type = other DNA
acgttgtctggaagtttgca

SEQ ID NO: 3012 - DNA, 20 bp, synthetic construct
  misc_feature 1..20: note = Synthetic construct
  source 1..20: mol_type = other DNA
cgttgtctggaagtttgcag

SEQ ID NO: 3013 - DNA, 20 bp, synthetic construct
  misc_feature 1..20: note = Synthetic construct
  source 1..20: mol_type = other DNA
gttgtctggaagtttgcagc

SEQ ID NO: 3014 - DNA, 20 bp, synthetic construct
  misc_feature 1..20: note = Synthetic construct
  source 1..20: mol_type = other DNA
ttgtctggaagtttgcagct

SEQ ID NO: 3015 - DNA, 20 bp, synthetic construct
  misc_feature 1..20: note = Synthetic construct
  source 1..20: mol_type = other DNA
tgtctggaagtttgcagctg

SEQ ID NO: 3016 - DNA, 20 bp, synthetic construct
  misc_feature 1..20: note = Synthetic construct
  source 1..20: mol_type = other DNA
gtctggaagtttgcagctgg

SEQ ID NO: 3017 - DNA, 20 bp, synthetic construct
  misc_feature 1..20: note = Synthetic construct
  source 1..20: mol_type = other DNA
tctggaagtttgcagctgga

SEQ ID NO: 3018 - DNA, 20 bp, synthetic construct
  misc_feature 1..20: note = Synthetic construct
  source 1..20: mol_type = other DNA
ctggaagtttgcagctggat

SEQ ID NO: 3019 - DNA, 20 bp, synthetic construct
  misc_feature 1..20: note = Synthetic construct
  source 1..20: mol_type = other DNA
tggaagtttgcagctggata

SEQ ID NO: 3020 - DNA, 20 bp, synthetic construct
  misc_feature 1..20: note = Synthetic construct
  source 1..20: mol_type = other DNA
ggaagtttgcagctggatac

SEQ ID NO: 3021 - DNA, 20 bp, synthetic construct
  misc_feature 1..20: note = Synthetic construct
  source 1..20: mol_type = other DNA
gaagtttgcagctggatacg

SEQ ID NO: 3022 - DNA, 20 bp, synthetic construct
  misc_feature 1..20: note = Synthetic construct
  source 1..20: mol_type = other DNA
aagtttgcagctggatacga

SEQ ID NO: 3023 - DNA, 20 bp, synthetic construct
  misc_feature 1..20: note = Synthetic construct
  source 1..20: mol_type = other DNA
agtttgcagctggatacgac

SEQ ID NO: 3024 - DNA, 20 bp, synthetic construct
  misc_feature 1..20: note = Synthetic construct
  source 1..20: mol_type = other DNA
gtttgcagctggatacgaca

SEQ ID NO: 3025 - DNA, 20 bp, synthetic construct
  misc_feature 1..20: note = Synthetic construct
  source 1..20: mol_type = other DNA
tttgcagctggatacgacag

SEQ ID NO: 3026 - DNA, 20 bp, synthetic construct
  misc_feature 1..20: note = Synthetic construct
  source 1..20: mol_type = other DNA
ttgcagctggatacgacaga

SEQ ID NO: 3027 - DNA, 20 bp, synthetic construct
  misc_feature 1..20: note = Synthetic construct
  source 1..20: mol_type = other DNA
tgcagctggatacgacagac

SEQ ID NO: 3028 - DNA, 20 bp, synthetic construct
  misc_feature 1..20: note = Synthetic construct
  source 1..20: mol_type = other DNA
gcagctggatacgacagacg

SEQ ID NO: 3029 - DNA, 20 bp, synthetic construct
  misc_feature 1..20: note = Synthetic construct
  source 1..20: mol_type = other DNA
cagctggatacgacagacgg

SEQ ID NO: 3030 - DNA, 20 bp, synthetic construct
  misc_feature 1..20: note = Synthetic construct
  source 1..20: mol_type = other DNA
agctggatacgacagacggc

SEQ ID NO: 3031 - DNA, 20 bp, synthetic construct
  misc_feature 1..20: note = Synthetic construct
  source 1..20: mol_type = other DNA
gctggatacgacagacggcc

SEQ ID NO: 3032 - DNA, 20 bp, synthetic construct
  misc_feature 1..20: note = Synthetic construct
  source 1..20: mol_type = other DNA
ctggatacgacagacggcca

SEQ ID NO: 3033 - DNA, 20 bp, synthetic construct
  misc_feature 1..20: note = Synthetic construct
  source 1..20: mol_type = other DNA
tggatacgacagacggccat

SEQ ID NO: 3034 - DNA, 20 bp, synthetic construct
  misc_feature 1..20: note = Synthetic construct
  source 1..20: mol_type = other DNA
ggatacgacagacggccatc

SEQ ID NO: 3035 - DNA, 20 bp, synthetic construct
  misc_feature 1..20: note = Synthetic construct
  source 1..20: mol_type = other DNA
gatacgacagacggccatct

SEQ ID NO: 3036 - DNA, 20 bp, synthetic construct
  misc_feature 1..20: note = Synthetic construct
  source 1..20: mol_type = other DNA
atacgacagacggccatcta

SEQ ID NO: 3037 - DNA, 20 bp, synthetic construct
  misc_feature 1..20: note = Synthetic construct
  source 1..20: mol_type = other DNA
tacgacagacggccatctaa

SEQ ID NO: 3038 - DNA, 20 bp, synthetic construct
  misc_feature 1..20: note = Synthetic construct
  source 1..20: mol_type = other DNA
acgacagacggccatctaac

SEQ ID NO: 3039 - DNA, 20 bp, synthetic construct
  misc_feature 1..20: note = Synthetic construct
  source 1..20: mol_type = other DNA
cgacagacggccatctaact

SEQ ID NO: 3040 - DNA, 20 bp, synthetic construct
  misc_feature 1..20: note = Synthetic construct
  source 1..20: mol_type = other DNA
gacagacggccatctaactt

SEQ ID NO: 3041 - DNA, 20 bp, synthetic construct
  misc_feature 1..20: note = Synthetic construct
  source 1..20: mol_type = other DNA
acagacggccatctaacttg

SEQ ID NO: 3042 - DNA, 20 bp, synthetic construct
  misc_feature 1..20: note = Synthetic construct
  source 1..20: mol_type = other DNA
cagacggccatctaacttga

SEQ ID NO: 3043 - DNA, 20 bp, synthetic construct
  misc_feature 1..20: note = Synthetic construct
  source 1..20: mol_type = other DNA
agacggccatctaacttgat

SEQ ID NO: 3044 - DNA, 20 bp, synthetic construct
  misc_feature 1..20: note = Synthetic construct
  source 1..20: mol_type = other DNA
gacggccatctaacttgatg

SEQ ID NO: 3045 - DNA, 20 bp, synthetic construct
  misc_feature 1..20: note = Synthetic construct
  source 1..20: mol_type = other DNA
acggccatctaacttgatgt

SEQ ID NO: 3046 - DNA, 20 bp, synthetic construct
  misc_feature 1..20: note = Synthetic construct
  source 1..20: mol_type = other DNA
cggccatctaacttgatgtt

SEQ ID NO: 3047 - DNA, 20 bp, synthetic construct
  misc_feature 1..20: note = Synthetic construct
  source 1..20: mol_type = other DNA
ggccatctaacttgatgtta

SEQ ID NO: 3048 - DNA, 20 bp, synthetic construct
  misc_feature 1..20: note = Synthetic construct
  source 1..20: mol_type = other DNA
gccatctaacttgatgttag

SEQ ID NO: 3049 - DNA, 20 bp, synthetic construct
  misc_feature 1..20: note = Synthetic construct
  source 1..20: mol_type = other DNA
ccatctaacttgatgttagt

SEQ ID NO: 3050 - DNA, 20 bp, synthetic construct
  misc_feature 1..20: note = Synthetic construct
  source 1..20: mol_type = other DNA
catctaacttgatgttagta

SEQ ID NO: 3051 - DNA, 20 bp, synthetic construct
  misc_feature 1..20: note = Synthetic construct
  source 1..20: mol_type = other DNA
atctaacttgatgttagtac

SEQ ID NO: 3052 - DNA, 20 bp, synthetic construct
  misc_feature 1..20: note = Synthetic construct
  source 1..20: mol_type = other DNA
tctaacttgatgttagtacc

SEQ ID NO: 3053 - DNA, 20 bp, synthetic construct
  misc_feature 1..20: note = Synthetic construct
  source 1..20: mol_type = other DNA
ctaacttgatgttagtaccg

SEQ ID NO: 3054 - DNA, 20 bp, synthetic construct
  misc_feature 1..20: note = Synthetic construct
  source 1..20: mol_type = other DNA
taacttgatgttagtaccga

SEQ ID NO: 3055 - DNA, 20 bp, synthetic construct
  misc_feature 1..20: note = Synthetic construct
  source 1..20: mol_type = other DNA
aacttgatgttagtaccgac

SEQ ID NO: 3056 - DNA, 20 bp, synthetic construct
  misc_feature 1..20: note = Synthetic construct
  source 1..20: mol_type = other DNA
acttgatgttagtaccgacc

SEQ ID NO: 3057 - DNA, 20 bp, synthetic construct
  misc_feature 1..20: note = Synthetic construct
  source 1..20: mol_type = other DNA
cttgatgttagtaccgacct

SEQ ID NO: 3058 - DNA, 20 bp, synthetic construct
  misc_feature 1..20: note = Synthetic construct
  source 1..20: mol_type = other DNA
ttgatgttagtaccgacctg

SEQ ID NO: 3059 - DNA, 20 bp, synthetic construct
  misc_feature 1..20: note = Synthetic construct
  source 1..20: mol_type = other DNA
tgatgttagtaccgacctga

SEQ ID NO: 3060 - DNA, 20 bp, synthetic construct
  misc_feature 1..20: note = Synthetic construct
  source 1..20: mol_type = other DNA
gatgttagtaccgacctgac

SEQ ID NO: 3061 - DNA, 20 bp, synthetic construct
  misc_feature 1..20: note = Synthetic construct
  source 1..20: mol_type = other DNA
atgttagtaccgacctgacg

SEQ ID NO: 3062 - DNA, 20 bp, synthetic construct
  misc_feature 1..20: note = Synthetic construct
  source 1..20: mol_type = other DNA
tgttagtaccgacctgacgt

SEQ ID NO: 3063 - DNA, 20 bp, synthetic construct
  misc_feature 1..20: note = Synthetic construct
  source 1..20: mol_type = other DNA
gttagtaccgacctgacgta

SEQ ID NO: 3064 - DNA, 20 bp, synthetic construct
  misc_feature 1..20: note = Synthetic construct
  source 1..20: mol_type = other DNA
ttagtaccgacctgacgtac

SEQ ID NO: 3065 - DNA, 20 bp, synthetic construct
  misc_feature 1..20: note = Synthetic construct
  source 1..20: mol_type = other DNA
tagtaccgacctgacgtacg

SEQ ID NO: 3066 - DNA, 20 bp, synthetic construct
  misc_feature 1..20: note = Synthetic construct
  source 1..20: mol_type = other DNA
agtaccgacctgacgtacgg

SEQ ID NO: 3067 - DNA, 20 bp, synthetic construct
  misc_feature 1..20: note = Synthetic construct
  source 1..20: mol_type = other DNA
gtaccgacctgacgtacggc

SEQ ID NO: 3068 - DNA, 20 bp, synthetic construct
  misc_feature 1..20: note = Synthetic construct
  source 1..20: mol_type = other DNA
taccgacctgacgtacggct

SEQ ID NO: 3069 - DNA, 20 bp, synthetic construct
  misc_feature 1..20: note = Synthetic construct
  source 1..20: mol_type = other DNA
accgacctgacgtacggctc

SEQ ID NO: 3070 - DNA, 20 bp, synthetic construct
  misc_feature 1..20: note = Synthetic construct
  source 1..20: mol_type = other DNA
ccgacctgacgtacggctct

SEQ ID NO: 3071 - DNA, 20 bp, synthetic construct
  misc_feature 1..20: note = Synthetic construct
  source 1..20: mol_type = other DNA
cgacctgacgtacggctctc

SEQ ID NO: 3072 - DNA, 20 bp, synthetic construct
  misc_feature 1..20: note = Synthetic construct
  source 1..20: mol_type = other DNA
gacctgacgtacggctctca

SEQ ID NO: 3073 - DNA, 20 bp, synthetic construct
  misc_feature 1..20: note = Synthetic construct
  source 1..20: mol_type = other DNA
acctgacgtacggctctcat

SEQ ID NO: 3074 - DNA, 20 bp, synthetic construct
  misc_feature 1..20: note = Synthetic construct
  source 1..20: mol_type = other DNA
cctgacgtacggctctcata

SEQ ID NO: 3075 - DNA, 20 bp, synthetic construct
  misc_feature 1..20: note = Synthetic construct
  source 1..20: mol_type = other DNA
ctgacgtacggctctcatag

SEQ ID NO: 3076 - DNA, 20 bp, synthetic construct
  misc_feature 1..20: note = Synthetic construct
  source 1..20: mol_type = other DNA
tgacgtacggctctcatagg

SEQ ID NO: 3077 - DNA, 20 bp, synthetic construct
  misc_feature 1..20: note = Synthetic construct
  source 1..20: mol_type = other DNA
gacgtacggctctcatagga

SEQ ID NO: 3078 - DNA, 20 bp, synthetic construct
  misc_feature 1..20: note = Synthetic construct
  source 1..20: mol_type = other DNA
acgtacggctctcataggaa

SEQ ID NO: 3079 - DNA, 20 bp, synthetic construct
  misc_feature 1..20: note = Synthetic construct
  source 1..20: mol_type = other DNA
cgtacggctctcataggaag

SEQ ID NO: 3080 - DNA, 20 bp, synthetic construct
  misc_feature 1..20: note = Synthetic construct
  source 1..20: mol_type = other DNA
gtacggctctcataggaaga

SEQ ID NO: 3081 - DNA, 20 bp, synthetic construct
  misc_feature 1..20: note = Synthetic construct
  source 1..20: mol_type = other DNA
tacggctctcataggaagaa

SEQ ID NO: 3082 - DNA, 20 bp, synthetic construct
  misc_feature 1..20: note = Synthetic construct
  source 1..20: mol_type = other DNA
acggctctcataggaagaaa

SEQ ID NO: 3083 - DNA, 20 bp, synthetic construct
  misc_feature 1..20: note = Synthetic construct
  source 1..20: mol_type = other DNA
cggctctcataggaagaaac

SEQ ID NO: 3084 - DNA, 20 bp, synthetic construct
  misc_feature 1..20: note = Synthetic construct
  source 1..20: mol_type = other DNA
ggctctcataggaagaaact

SEQ ID NO: 3085 - DNA, 20 bp, synthetic construct
  misc_feature 1..20: note = Synthetic construct
  source 1..20: mol_type = other DNA
gctctcataggaagaaactc

SEQ ID NO: 3086 - DNA, 20 bp, synthetic construct
  misc_feature 1..20: note = Synthetic construct
  source 1..20: mol_type = other DNA
ctctcataggaagaaactct

SEQ ID NO: 3087 - DNA, 20 bp, synthetic construct
  misc_feature 1..20: note = Synthetic construct
  source 1..20: mol_type = other DNA
tctcataggaagaaactctt

SEQ ID NO: 3088 - DNA, 20 bp, synthetic construct
  misc_feature 1..20: note = Synthetic construct
  source 1..20: mol_type = other DNA
ctcataggaagaaactcttg

SEQ ID NO: 3089 - DNA, 20 bp, synthetic construct
  misc_feature 1..20: note = Synthetic construct
  source 1..20: mol_type = other DNA
tcataggaagaaactcttga

SEQ ID NO: 3090 - DNA, 20 bp, synthetic construct
  misc_feature 1..20: note = Synthetic construct
  source 1..20: mol_type = other DNA
cataggaagaaactcttgaa

SEQ ID NO: 3091 - DNA, 20 bp, synthetic construct
  misc_feature 1..20: note = Synthetic construct
  source 1..20: mol_type = other DNA
ataggaagaaactcttgaag

SEQ ID NO: 3092 - DNA, 20 bp, synthetic construct
  misc_feature 1..20: note = Synthetic construct
  source 1..20: mol_type = other DNA
taggaagaaactcttgaagg

SEQ ID NO: 3093 - DNA, 20 bp, synthetic construct
  misc_feature 1..20: note = Synthetic construct
  source 1..20: mol_type = other DNA
aggaagaaactcttgaaggt

SEQ ID NO: 3094 - DNA, 20 bp, synthetic construct
  misc_feature 1..20: note = Synthetic construct
  source 1..20: mol_type = other DNA
ggaagaaactcttgaaggtg

SEQ ID NO: 3095 - DNA, 20 bp, synthetic construct
  misc_feature 1..20: note = Synthetic construct
  source 1..20: mol_type = other DNA
gaagaaactcttgaaggtga

SEQ ID NO: 3096 - DNA, 20 bp, synthetic construct
  misc_feature 1..20: note = Synthetic construct
  source 1..20: mol_type = other DNA
aagaaactcttgaaggtgaa

SEQ ID NO: 3097 - DNA, 20 bp, synthetic construct
  misc_feature 1..20: note = Synthetic construct
  source 1..20: mol_type = other DNA
agaaactcttgaaggtgaac

SEQ ID NO: 3098 - DNA, 20 bp, synthetic construct
  misc_feature 1..20: note = Synthetic construct
  source 1..20: mol_type = other DNA
gaaactcttgaaggtgaacc

SEQ ID NO: 3099 - DNA, 20 bp, synthetic construct
  misc_feature 1..20: note = Synthetic construct
  source 1..20: mol_type = other DNA
aaactcttgaaggtgaacct

SEQ ID NO: 3100 - DNA, 20 bp, synthetic construct
  misc_feature 1..20: note = Synthetic construct
  source 1..20: mol_type = other DNA
aactcttgaaggtgaacctt

SEQ ID NO: 3101 - DNA, 20 bp, synthetic construct
  misc_feature 1..20: note = Synthetic construct
  source 1..20: mol_type = other DNA
actcttgaaggtgaaccttc

SEQ ID NO: 3102 - DNA, 20 bp, synthetic construct
  misc_feature 1..20: note = Synthetic construct
  source 1..20: mol_type = other DNA
ctcttgaaggtgaaccttcg

SEQ ID NO: 3103 - DNA, 20 bp, synthetic construct
  misc_feature 1..20: note = Synthetic construct
  source 1..20: mol_type = other DNA
tcttgaaggtgaaccttcgt

SEQ ID NO: 3104 - DNA, 20 bp, synthetic construct
  misc_feature 1..20: note = Synthetic construct
  source 1..20: mol_type = other DNA
cttgaaggtgaaccttcgta

SEQ ID NO: 3105 - DNA, 20 bp, synthetic construct
  misc_feature 1..20: note = Synthetic construct
  source 1..20: mol_type = other DNA
ttgaaggtgaaccttcgtaa

SEQ ID NO: 3106 - DNA, 20 bp, synthetic construct
  misc_feature 1..20: note = Synthetic construct
  source 1..20: mol_type = other DNA
tgaaggtgaaccttcgtaag

SEQ ID NO: 3107 - DNA, 20 bp, synthetic construct
  misc_feature 1..20: note = Synthetic construct
  source 1..20: mol_type = other DNA
gaaggtgaaccttcgtaagc

SEQ ID NO: 3108 - DNA, 20 bp, synthetic construct
  misc_feature 1..20: note = Synthetic construct
  source 1..20: mol_type = other DNA
aaggtgaaccttcgtaagca

SEQ ID NO: 3109 - DNA, 20 bp, synthetic construct
  misc_feature 1..20: note = Synthetic construct
  source 1..20: mol_type = other DNA
aggtgaaccttcgtaagcat

SEQ ID NO: 3110 - DNA, 20 bp, synthetic construct
  misc_feature 1..20: note = Synthetic construct
  source 1..20: mol_type = other DNA
ggtgaaccttcgtaagcatc

SEQ ID NO: 3111 - DNA, 20 bp, synthetic construct
  misc_feature 1..20: note = Synthetic construct
  source 1..20: mol_type = other DNA
gtgaaccttcgtaagcatct

SEQ ID NO: 3112 - DNA, 20 bp, synthetic construct
  misc_feature 1..20: note = Synthetic construct
  source 1..20: mol_type = other DNA
tgaaccttcgtaagcatctc

SEQ ID NO: 3113 - DNA, 20 bp, synthetic construct
  misc_feature 1..20: note = Synthetic construct
  source 1..20: mol_type = other DNA
gaaccttcgtaagcatctca

SEQ ID NO: 3114 - DNA, 20 bp, synthetic construct
  misc_feature 1..20: note = Synthetic construct
  source 1..20: mol_type = other DNA
aaccttcgtaagcatctcat

SEQ ID NO: 3115 - DNA, 20 bp, synthetic construct
  misc_feature 1..20: note = Synthetic construct
  source 1..20: mol_type = other DNA
accttcgtaagcatctcata

SEQ ID NO: 3116 - DNA, 20 bp, synthetic construct
  misc_feature 1..20: note = Synthetic construct
  source 1..20: mol_type = other DNA
ccttcgtaagcatctcatat

SEQ ID NO: 3117 - DNA, 20 bp, synthetic construct
  misc_feature 1..20: note = Synthetic construct
  source 1..20: mol_type = other DNA
cttcgtaagcatctcatatg

SEQ ID NO: 3118 - DNA, 20 bp, synthetic construct
  misc_feature 1..20: note = Synthetic construct
  source 1..20: mol_type = other DNA
ttcgtaagcatctcatatgc

SEQ ID NO: 3119 - DNA, 20 bp, synthetic construct
  misc_feature 1..20: note = Synthetic construct
  source 1..20: mol_type = other DNA
tcgtaagcatctcatatgca

SEQ ID NO: 3120 - DNA, 20 bp, synthetic construct
  misc_feature 1..20: note = Synthetic construct
  source 1..20: mol_type = other DNA
cgtaagcatctcatatgcac

SEQ ID NO: 3121 - DNA, 20 bp, synthetic construct
  misc_feature 1..20: note = Synthetic construct
  source 1..20: mol_type = other DNA
gtaagcatctcatatgcacc

SEQ ID NO: 3122 - DNA, 20 bp, synthetic construct
  misc_feature 1..20: note = Synthetic construct
  source 1..20: mol_type = other DNA
taagcatctcatatgcaccc

SEQ ID NO: 3123 - DNA, 20 bp, synthetic construct
  misc_feature 1..20: note = Synthetic construct
  source 1..20: mol_type = other DNA
aagcatctcatatgcaccct

SEQ ID NO: 3124 - DNA, 20 bp, synthetic construct
  misc_feature 1..20: note = Synthetic construct
  source 1..20: mol_type = other DNA
agcatctcatatgcaccctg

SEQ ID NO: 3125 - DNA, 20 bp, synthetic construct
  misc_feature 1..20: note = Synthetic construct
  source 1..20: mol_type = other DNA
gcatctcatatgcaccctgg

SEQ ID NO: 3126 - DNA, 20 bp, synthetic construct
  misc_feature 1..20: note = Synthetic construct
  source 1..20: mol_type = other DNA
catctcatatgcaccctgga

SEQ ID NO: 3127 - DNA, 20 bp, synthetic construct
  misc_feature 1..20: note = Synthetic construct
  source 1..20: mol_type = other DNA
atctcatatgcaccctggat

SEQ ID NO: 3128 - DNA, 20 bp, synthetic construct
  misc_feature 1..20: note = Synthetic construct
  source 1..20: mol_type = other DNA
tctcatatgcaccctggata

SEQ ID NO: 3129 - DNA, 20 bp, synthetic construct
  misc_feature 1..20: note = Synthetic construct
  source 1..20: mol_type = other DNA
ctcatatgcaccctggatat

SEQ ID NO: 3130 - DNA, 20 bp, synthetic construct
  misc_feature 1..20: note = Synthetic construct
  source 1..20: mol_type = other DNA
tcatatgcaccctggatatc

SEQ ID NO: 3131 - DNA, 20 bp, synthetic construct
  misc_feature 1..20: note = Synthetic construct
  source 1..20: mol_type = other DNA
catatgcaccctggatatca

SEQ ID NO: 3132 - DNA, 20 bp, synthetic construct
  misc_feature 1..20: note = Synthetic construct
  source 1..20: mol_type = other DNA
atatgcaccctggatatcac

SEQ ID NO: 3133 - DNA, 20 bp, synthetic construct
  misc_feature 1..20: note = Synthetic construct
  source 1..20: mol_type = other DNA
tatgcaccctggatatcact

SEQ ID NO: 3134 - DNA, 20 bp, synthetic construct
  misc_feature 1..20: note = Synthetic construct
  source 1..20: mol_type = other DNA
atgcaccctggatatcactc

SEQ ID NO: 3135 - DNA, 20 bp, synthetic construct
  misc_feature 1..20: note = Synthetic construct
  source 1..20: mol_type = other DNA
tgcaccctggatatcactca

SEQ ID NO: 3136 - DNA, 20 bp, synthetic construct
  misc_feature 1..20: note = Synthetic construct
  source 1..20: mol_type = other DNA
gcaccctggatatcactcat

SEQ ID NO: 3137 - DNA, 20 bp, synthetic construct
  misc_feature 1..20: note = Synthetic construct
  source 1..20: mol_type = other DNA
caccctggatatcactcatt

SEQ ID NO: 3138 - DNA, 20 bp, synthetic construct
  misc_feature 1..20: note = Synthetic construct
  source 1..20: mol_type = other DNA
accctggatatcactcatta

SEQ ID NO: 3139 - DNA, 20 bp, synthetic construct
  misc_feature 1..20: note = Synthetic construct
  source 1..20: mol_type = other DNA
ccctggatatcactcattag

SEQ ID NO: 3140 - DNA, 20 bp, synthetic construct
  misc_feature 1..20: note = Synthetic construct
  source 1..20: mol_type = other DNA
cctggatatcactcattagt

SEQ ID NO: 3141 - DNA, 20 bp, synthetic construct
  misc_feature 1..20: note = Synthetic construct
  source 1..20: mol_type = other DNA
ctggatatcactcattagtg

SEQ ID NO: 3142 - DNA, 20 bp, synthetic construct
  misc_feature 1..20: note = Synthetic construct
  source 1..20: mol_type = other DNA
tggatatcactcattagtgg

SEQ ID NO: 3143 - DNA, 20 bp, synthetic construct
  misc_feature 1..20: note = Synthetic construct
  source 1..20: mol_type = other DNA
ggatatcactcattagtggt

SEQ ID NO: 3144 - DNA, 20 bp, synthetic construct
  misc_feature 1..20: note = Synthetic construct
  source 1..20: mol_type = other DNA
gatatcactcattagtggta

SEQ ID NO: 3145 - DNA, 20 bp, synthetic construct
  misc_feature 1..20: note = Synthetic construct
  source 1..20: mol_type = other DNA
atatcactcattagtggtaa

SEQ ID NO: 3146 - DNA, 20 bp, synthetic construct
  misc_feature 1..20: note = Synthetic construct
  source 1..20: mol_type = other DNA
tatcactcattagtggtaac

SEQ ID NO: 3147 - DNA, 20 bp, synthetic construct
  misc_feature 1..20: note = Synthetic construct
  source 1..20: mol_type = other DNA
atcactcattagtggtaacc

SEQ ID NO: 3148 - DNA, 20 bp, synthetic construct
  misc_feature 1..20: note = Synthetic construct
  source 1..20: mol_type = other DNA
tcactcattagtggtaacca

SEQ ID NO: 3149 - DNA, 20 bp, synthetic construct
  misc_feature 1..20: note = Synthetic construct
  source 1..20: mol_type = other DNA
cactcattagtggtaaccaa

SEQ ID NO: 3150 - DNA, 20 bp, synthetic construct
  misc_feature 1..20: note = Synthetic construct
  source 1..20: mol_type = other DNA
actcattagtggtaaccaac

SEQ ID NO: 3151 - DNA, 20 bp, synthetic construct
  misc_feature 1..20: note = Synthetic construct
  source 1..20: mol_type = other DNA
ctcattagtggtaaccaacc

SEQ ID NO: 3152 - DNA, 20 bp, synthetic construct
  misc_feature 1..20: note = Synthetic construct
  source 1..20: mol_type = other DNA
tcattagtggtaaccaaccg

SEQ ID NO: 3153 - DNA, 20 bp, synthetic construct
  misc_feature 1..20: note = Synthetic construct
  source 1..20: mol_type = other DNA
cattagtggtaaccaaccga

SEQ ID NO: 3154 - DNA, 20 bp, synthetic construct
  misc_feature 1..20: note = Synthetic construct
  source 1..20: mol_type = other DNA
attagtggtaaccaaccgaa

SEQ ID NO: 3155 - DNA, 20 bp, synthetic construct
  misc_feature 1..20: note = Synthetic construct
  source 1..20: mol_type = other DNA
ttagtggtaaccaaccgaac

SEQ ID NO: 3156 - DNA, 20 bp, synthetic construct
  misc_feature 1..20: note = Synthetic construct
  source 1..20: mol_type = other DNA
tagtggtaaccaaccgaact

SEQ ID NO: 3157 - DNA, 20 bp, synthetic construct
  misc_feature 1..20: note = Synthetic construct
  source 1..20: mol_type = other DNA
agtggtaaccaaccgaactg

SEQ ID NO: 3158 - DNA, 20 bp, synthetic construct
  misc_feature 1..20: note = Synthetic construct
  source 1..20: mol_type = other DNA
gtggtaaccaaccgaactgc

SEQ ID NO: 3159 - DNA, 20 bp, synthetic construct
  misc_feature 1..20: note = Synthetic construct
  source 1..20: mol_type = other DNA
tggtaaccaaccgaactgca

SEQ ID NO: 3160 - DNA, 20 bp, synthetic construct
  misc_feature 1..20: note = Synthetic construct
  source 1..20: mol_type = other DNA
ggtaaccaaccgaactgcaa

SEQ ID NO: 3161 - DNA, 20 bp, synthetic construct
  misc_feature 1..20: note = Synthetic construct
  source 1..20: mol_type = other DNA
gtaaccaaccgaactgcaac

SEQ ID NO: 3162 - DNA, 20 bp, synthetic construct
  misc_feature 1..20: note = Synthetic construct
  source 1..20: mol_type = other DNA
taaccaaccgaactgcaact

SEQ ID NO: 3163 - DNA, 20 bp, synthetic construct
  misc_feature 1..20: note = Synthetic construct
  source 1..20: mol_type = other DNA
aaccaaccgaactgcaactc

SEQ ID NO: 3164 - DNA, 20 bp, synthetic construct
  misc_feature 1..20: note = Synthetic construct
  source 1..20: mol_type = other DNA
accaaccgaactgcaactcc

SEQ ID NO: 3165 - DNA, 20 bp, synthetic construct
  misc_feature 1..20: note = Synthetic construct
  source 1..20: mol_type = other DNA
ccaaccgaactgcaactcca

SEQ ID NO: 3166 - DNA, 20 bp, synthetic construct
  misc_feature 1..20: note = Synthetic construct
  source 1..20: mol_type = other DNA
caaccgaactgcaactccaa

SEQ ID NO: 3167 - DNA, 20 bp, synthetic construct
  misc_feature 1..20: note = Synthetic construct
  source 1..20: mol_type = other DNA
aaccgaactgcaactccaac

SEQ ID NO: 3168 - DNA, 20 bp, synthetic construct
  misc_feature 1..20: note = Synthetic construct
  source 1..20: mol_type = other DNA
accgaactgcaactccaacc

SEQ ID NO: 3169 - DNA, 20 bp, synthetic construct
  misc_feature 1..20: note = Synthetic construct
  source 1..20: mol_type = other DNA
ccgaactgcaactccaacca

SEQ ID NO: 3170 - DNA, 20 bp, synthetic construct
  misc_feature 1..20: note = Synthetic construct
  source 1..20: mol_type = other DNA
cgaactgcaactccaaccac

SEQ ID NO: 3171 - DNA, 20 bp, synthetic construct
  misc_feature 1..20: note = Synthetic construct
  source 1..20: mol_type = other DNA
gaactgcaactccaaccacc

SEQ ID NO: 3172 - DNA, 20 bp, synthetic construct
  misc_feature 1..20: note = Synthetic construct
  source 1..20: mol_type = other DNA
aactgcaactccaaccacct

SEQ ID NO: 3173 - DNA, 20 bp, synthetic construct
  misc_feature 1..20: note = Synthetic construct
  source 1..20: mol_type = other DNA
actgcaactccaaccacctg

SEQ ID NO: 3174 - DNA, 20 bp, synthetic construct
  misc_feature 1..20: note = Synthetic construct
  source 1..20: mol_type = other DNA
ctgcaactccaaccacctgc

SEQ ID NO: 3175 - DNA, 20 bp, synthetic construct
  misc_feature 1..20: note = Synthetic construct
  source 1..20: mol_type = other DNA
tgcaactccaaccacctgcc

SEQ ID NO: 3176 - DNA, 20 bp, synthetic construct
  misc_feature 1..20: note = Synthetic construct
  source 1..20: mol_type = other DNA
gcaactccaaccacctgccg

SEQ ID NO: 3177 - DNA, 20 bp, synthetic construct
  misc_feature 1..20: note = Synthetic construct
  source 1..20: mol_type = other DNA
caactccaaccacctgccgg

SEQ ID NO: 3178 - DNA, 20 bp, synthetic construct
  misc_feature 1..20: note = Synthetic construct
  source 1..20: mol_type = other DNA
aactccaaccacctgccggc

SEQ ID NO: 3179 - DNA, 20 bp, synthetic construct
  misc_feature 1..20: note = Synthetic construct
  source 1..20: mol_type = other DNA
actccaaccacctgccggcc

SEQ ID NO: 3180 - DNA, 20 bp, synthetic construct
  misc_feature 1..20: note = Synthetic construct
  source 1..20: mol_type = other DNA
ctccaaccacctgccggcca

SEQ ID NO: 3181 - DNA, 20 bp, synthetic construct
  misc_feature 1..20: note = Synthetic construct
  source 1..20: mol_type = other DNA
tccaaccacctgccggccac

SEQ ID NO: 3182 - DNA, 20 bp, synthetic construct
  misc_feature 1..20: note = Synthetic construct
  source 1..20: mol_type = other DNA
ccaaccacctgccggccacg

SEQ ID NO: 3183 - DNA, 20 bp, synthetic construct
  misc_feature 1..20: note = Synthetic construct
  source 1..20: mol_type = other DNA
caaccacctgccggccacgt

SEQ ID NO: 3184 - DNA, 20 bp, synthetic construct
  misc_feature 1..20: note = Synthetic construct
  source 1..20: mol_type = other DNA
aaccacctgccggccacgtg

SEQ ID NO: 3185 - DNA, 20 bp, synthetic construct
  misc_feature 1..20: note = Synthetic construct
  source 1..20: mol_type = other DNA
accacctgccggccacgtgt

SEQ ID NO: 3186 - DNA, 20 bp, synthetic construct
  misc_feature 1..20: note = Synthetic construct
  source 1..20: mol_type = other DNA
ccacctgccggccacgtgtt

SEQ ID NO: 3187 - DNA, 20 bp, synthetic construct
  misc_feature 1..20: note = Synthetic construct
  source 1..20: mol_type = other DNA
cacctgccggccacgtgttt

SEQ ID NO: 3188 - DNA, 20 bp, synthetic construct
  misc_feature 1..20: note = Synthetic construct
  source 1..20: mol_type = other DNA
acctgccggccacgtgtttt

SEQ ID NO: 3189 - DNA, 20 bp, synthetic construct
  misc_feature 1..20: note = Synthetic construct
  source 1..20: mol_type = other DNA
cctgccggccacgtgttttg

SEQ ID NO: 3190 - DNA, 20 bp, synthetic construct
  misc_feature 1..20: note = Synthetic construct
  source 1..20: mol_type = other DNA
ctgccggccacgtgttttga

SEQ ID NO: 3191 - DNA, 20 bp, synthetic construct
  misc_feature 1..20: note = Synthetic construct
  source 1..20: mol_type = other DNA
tgccggccacgtgttttgat

SEQ ID NO: 3192 - DNA, 20 bp, synthetic construct
  misc_feature 1..20: note = Synthetic construct
  source 1..20: mol_type = other DNA
gccggccacgtgttttgatc

SEQ ID NO: 3193 - DNA, 20 bp, synthetic construct
  misc_feature 1..20: note = Synthetic construct
  source 1..20: mol_type = other DNA
ccggccacgtgttttgatcg

SEQ ID NO: 3194 - DNA, 20 bp, synthetic construct
  misc_feature 1..20: note = Synthetic construct
  source 1..20: mol_type = other DNA
cggccacgtgttttgatcga

SEQ ID NO: 3195 - DNA, 20 bp, synthetic construct
  misc_feature 1..20: note = Synthetic construct
  source 1..20: mol_type = other DNA
ggccacgtgttttgatcgaa

SEQ ID NO: 3196 - DNA, 20 bp, synthetic construct
  misc_feature 1..20: note = Synthetic construct
  source 1..20: mol_type = other DNA
gccacgtgttttgatcgaaa

SEQ ID NO: 3197 - DNA, 20 bp, synthetic construct
  misc_feature 1..20: note = Synthetic construct
  source 1..20: mol_type = other DNA
ccacgtgttttgatcgaaac

SEQ ID NO: 3198 - DNA, 20 bp, synthetic construct
  misc_feature 1..20: note = Synthetic construct
  source 1..20: mol_type = other DNA
cacgtgttttgatcgaaact

SEQ ID NO: 3199 - DNA, 20 bp, synthetic construct
  misc_feature 1..20: note = Synthetic construct
  source 1..20: mol_type = other DNA
acgtgttttgatcgaaactt

SEQ ID NO: 3200 - DNA, 20 bp, synthetic construct
  misc_feature 1..20: note = Synthetic construct
  source 1..20: mol_type = other DNA
cgtgttttgatcgaaacttt

SEQ ID NO: 3201 - DNA, 20 bp, synthetic construct
  misc_feature 1..20: note = Synthetic construct
  source 1..20: mol_type = other DNA
gtgttttgatcgaaactttc

SEQ ID NO: 3202 - DNA, 20 bp, synthetic construct
  misc_feature 1..20: note = Synthetic construct
  source 1..20: mol_type = other DNA
tgttttgatcgaaactttcg

SEQ ID NO: 3203 - DNA, 20 bp, synthetic construct
  misc_feature 1..20: note = Synthetic construct
  source 1..20: mol_type = other DNA
gttttgatcgaaactttcga

SEQ ID NO: 3204 - DNA, 20 bp, synthetic construct
  misc_feature 1..20: note = Synthetic construct
  source 1..20: mol_type = other DNA
ttttgatcgaaactttcgat

SEQ ID NO: 3205 - DNA, 20 bp, synthetic construct
  misc_feature 1..20: note = Synthetic construct
  source 1..20: mol_type = other DNA
tttgatcgaaactttcgatc

SEQ ID NO: 3206 - DNA, 20 bp, synthetic construct
  misc_feature 1..20: note = Synthetic construct
  source 1..20: mol_type = other DNA
ttgatcgaaactttcgatct

SEQ ID NO: 3207 - DNA, 20 bp, synthetic construct
  misc_feature 1..20: note = Synthetic construct
  source 1..20: mol_type = other DNA
tgatcgaaactttcgatctt

SEQ ID NO: 3208 - DNA, 20 bp, synthetic construct
  misc_feature 1..20: note = Synthetic construct
  source 1..20: mol_type = other DNA
gatcgaaactttcgatcttc

SEQ ID NO: 3209 - DNA, 20 bp, synthetic construct
  misc_feature 1..20: note = Synthetic construct
  source 1..20: mol_type = other DNA
atcgaaactttcgatcttcg

SEQ ID NO: 3210 - DNA, 20 bp, synthetic construct
  misc_feature 1..20: note = Synthetic construct
  source 1..20: mol_type = other DNA
tcgaaactttcgatcttcgt

SEQ ID NO: 3211 - DNA, 20 bp, synthetic construct
  misc_feature 1..20: note = Synthetic construct
  source 1..20: mol_type = other DNA
cgaaactttcgatcttcgtt

SEQ ID NO: 3212 - DNA, 20 bp, synthetic construct
  misc_feature 1..20: note = Synthetic construct
  source 1..20: mol_type = other DNA
gaaactttcgatcttcgttt

SEQ ID NO: 3213 - DNA, 20 bp, synthetic construct
  misc_feature 1..20: note = Synthetic construct
  source 1..20: mol_type = other DNA
aaactttcgatcttcgttta

SEQ ID NO: 3214 - DNA, 20 bp, synthetic construct
  misc_feature 1..20: note = Synthetic construct
  source 1..20: mol_type = other DNA
aactttcgatcttcgtttag

SEQ ID NO: 3215 - DNA, 20 bp, synthetic construct
  misc_feature 1..20: note = Synthetic construct
  source 1..20: mol_type = other DNA
actttcgatcttcgtttagg

SEQ ID NO: 3216 - DNA, 20 bp, synthetic construct
  misc_feature 1..20: note = Synthetic construct
  source 1..20: mol_type = other DNA
ctttcgatcttcgtttaggg

SEQ ID NO: 3217 - DNA, 20 bp, synthetic construct
  misc_feature 1..20: note = Synthetic construct
  source 1..20: mol_type = other DNA
tttcgatcttcgtttagggc

SEQ ID NO: 3218 - DNA, 20 bp, synthetic construct
  misc_feature 1..20: note = Synthetic construct
  source 1..20: mol_type = other DNA
ttcgatcttcgtttagggca

SEQ ID NO: 3219 - DNA, 20 bp, synthetic construct
  misc_feature 1..20: note = Synthetic construct
  source 1..20: mol_type = other DNA
tcgatcttcgtttagggcaa

SEQ ID NO: 3220 - DNA, 20 bp, synthetic construct
  misc_feature 1..20: note = Synthetic construct
  source 1..20: mol_type = other DNA
cgatcttcgtttagggcaag

SEQ ID NO: 3221 - DNA, 20 bp, synthetic construct
  misc_feature 1..20: note = Synthetic construct
  source 1..20: mol_type = other DNA
gatcttcgtttagggcaagg

SEQ ID NO: 3222 - DNA, 20 bp, synthetic construct
  misc_feature 1..20: note = Synthetic construct
  source 1..20: mol_type = other DNA
atcttcgtttagggcaaggt

SEQ ID NO: 3223 - DNA, 20 bp, synthetic construct
  misc_feature 1..20: note = Synthetic construct
  source 1..20: mol_type = other DNA
tcttcgtttagggcaaggta

SEQ ID NO: 3224 - DNA, 20 bp, synthetic construct
  misc_feature 1..20: note = Synthetic construct
  source 1..20: mol_type = other DNA
cttcgtttagggcaaggtag

SEQ ID NO: 3225 - DNA, 20 bp, synthetic construct
  misc_feature 1..20: note = Synthetic construct
  source 1..20: mol_type = other DNA
ttcgtttagggcaaggtagc

SEQ ID NO: 3226 - DNA, 20 bp, synthetic construct
  misc_feature 1..20: note = Synthetic construct
  source 1..20: mol_type = other DNA
tcgtttagggcaaggtagcg

SEQ ID NO: 3227 - DNA, 20 bp, synthetic construct
  misc_feature 1..20: note = Synthetic construct
  source 1..20: mol_type = other DNA
cgtttagggcaaggtagcgg

SEQ ID NO: 3228 - DNA, 20 bp, synthetic construct
  misc_feature 1..20: note = Synthetic construct
  source 1..20: mol_type = other DNA
gtttagggcaaggtagcgga

SEQ ID NO: 3229 - DNA, 20 bp, synthetic construct
  misc_feature 1..20: note = Synthetic construct
  source 1..20: mol_type = other DNA
tttagggcaaggtagcggag

SEQ ID NO: 3230 - DNA, 20 bp, synthetic construct
  misc_feature 1..20: note = Synthetic construct
  source 1..20: mol_type = other DNA
ttagggcaaggtagcggagc

SEQ ID NO: 3231 - DNA, 20 bp, synthetic construct
  misc_feature 1..20: note = Synthetic construct
  source 1..20: mol_type = other DNA
tagggcaaggtagcggagcg

SEQ ID NO: 3232 - DNA, 20 bp, synthetic construct
  misc_feature 1..20: note = Synthetic construct
  source 1..20: mol_type = other DNA
agggcaaggtagcggagcgc

SEQ ID NO: 3233 - DNA, 20 bp, synthetic construct
  misc_feature 1..20: note = Synthetic construct
  source 1..20: mol_type = other DNA
gggcaaggtagcggagcgcc

SEQ ID NO: 3234 - DNA, 20 bp, synthetic construct
  misc_feature 1..20: note = Synthetic construct
  source 1..20: mol_type = other DNA
ggcaaggtagcggagcgcct

SEQ ID NO: 3235 - DNA, 20 bp, synthetic construct
  misc_feature 1..20: note = Synthetic construct
  source 1..20: mol_type = other DNA
gcaaggtagcggagcgcctg

SEQ ID NO: 3236 - DNA, 20 bp, synthetic construct
  misc_feature 1..20: note = Synthetic construct
  source 1..20: mol_type = other DNA
caaggtagcggagcgcctgg

SEQ ID NO: 3237 - DNA, 20 bp, synthetic construct
  misc_feature 1..20: note = Synthetic construct
  source 1..20: mol_type = other DNA
aaggtagcggagcgcctggc

SEQ ID NO: 3238 - DNA, 20 bp, synthetic construct
  misc_feature 1..20: note = Synthetic construct
  source 1..20: mol_type = other DNA
aggtagcggagcgcctggcg

SEQ ID NO: 3239 - DNA, 20 bp, synthetic construct
  misc_feature 1..20: note = Synthetic construct
  source 1..20: mol_type = other DNA
ggtagcggagcgcctggcgc

SEQ ID NO: 3240 - DNA, 20 bp, synthetic construct
  misc_feature 1..20: note = Synthetic construct
  source 1..20: mol_type = other DNA
gtagcggagcgcctggcgcc

SEQ ID NO: 3241 - DNA, 20 bp, synthetic construct
  misc_feature 1..20: note = Synthetic construct
  source 1..20: mol_type = other DNA
tagcggagcgcctggcgcca

SEQ ID NO: 3242 - DNA, 20 bp, synthetic construct
  misc_feature 1..20: note = Synthetic construct
  source 1..20: mol_type = other DNA
agcggagcgcctggcgccaa

SEQ ID NO: 3243 - DNA, 20 bp, synthetic construct
  misc_feature 1..20: note = Synthetic construct
  source 1..20: mol_type = other DNA
gcggagcgcctggcgccaat

SEQ ID NO: 3244 - DNA, 20 bp, synthetic construct
  misc_feature 1..20: note = Synthetic construct
  source 1..20: mol_type = other DNA
cggagcgcctggcgccaatt

SEQ ID NO: 3245 - DNA, 20 bp, synthetic construct
  misc_feature 1..20: note = Synthetic construct
  source 1..20: mol_type = other DNA
ggagcgcctggcgccaatta

SEQ ID NO: 3246 - DNA, 20 bp, synthetic construct
  misc_feature 1..20: note = Synthetic construct
  source 1..20: mol_type = other DNA
gagcgcctggcgccaattac

SEQ ID NO: 3247 - DNA, 20 bp, synthetic construct
  misc_feature 1..20: note = Synthetic construct
  source 1..20: mol_type = other DNA
agcgcctggcgccaattacc

SEQ ID NO: 3248 - DNA, 20 bp, synthetic construct
  misc_feature 1..20: note = Synthetic construct
  source 1..20: mol_type = other DNA
gcgcctggcgccaattaccg

SEQ ID NO: 3249 - DNA, 20 bp, synthetic construct
  misc_feature 1..20: note = Synthetic construct
  source 1..20: mol_type = other DNA
cgcctggcgccaattaccgc

SEQ ID NO: 3250 - DNA, 20 bp, synthetic construct
  misc_feature 1..20: note = Synthetic construct
  source 1..20: mol_type = other DNA
gcctggcgccaattaccgcg

SEQ ID NO: 3251 - DNA, 20 bp, synthetic construct
  misc_feature 1..20: note = Synthetic construct
  source 1..20: mol_type = other DNA
cctggcgccaattaccgcga

SEQ ID NO: 3252 - DNA, 20 bp, synthetic construct
  misc_feature 1..20: note = Synthetic construct
  source 1..20: mol_type = other DNA
ctggcgccaattaccgcgac

SEQ ID NO: 3253 - DNA, 20 bp, synthetic construct
  misc_feature 1..20: note = Synthetic construct
  source 1..20: mol_type = other DNA
tggcgccaattaccgcgacg

SEQ ID NO: 3254 - DNA, 20 bp, synthetic construct
  misc_feature 1..20: note = Synthetic construct
  source 1..20: mol_type = other DNA
ggcgccaattaccgcgacga

SEQ ID NO: 3255 - DNA, 20 bp, synthetic construct
  misc_feature 1..20: note = Synthetic construct
  source 1..20: mol_type = other DNA
gcgccaattaccgcgacgag

SEQ ID NO: 3256 - DNA, 20 bp, synthetic construct
  misc_feature 1..20: note = Synthetic construct
  source 1..20: mol_type = other DNA
cgccaattaccgcgacgagc

SEQ ID NO: 3257 - DNA, 20 bp, synthetic construct
  misc_feature 1..20: note = Synthetic construct
  source 1..20: mol_type = other DNA
gccaattaccgcgacgagcg

SEQ ID NO: 3258 - DNA, 20 bp, synthetic construct
  misc_feature 1..20: note = Synthetic construct
  source 1..20: mol_type = other DNA
ccaattaccgcgacgagcgg

SEQ ID NO: 3259 - DNA, 20 bp, synthetic construct
  misc_feature 1..20: note = Synthetic construct
  source 1..20: mol_type = other DNA
caattaccgcgacgagcggc

SEQ ID NO: 3260 - DNA, 20 bp, synthetic construct
  misc_feature 1..20: note = Synthetic construct
  source 1..20: mol_type = other DNA
aattaccgcgacgagcggca

SEQ ID NO: 3261 - DNA, 20 bp, synthetic construct
  misc_feature 1..20: note = Synthetic construct
  source 1..20: mol_type = other DNA
attaccgcgacgagcggcag

SEQ ID NO: 3262 - DNA, 20 bp, synthetic construct
  misc_feature 1..20: note = Synthetic construct
  source 1..20: mol_type = other DNA
ttaccgcgacgagcggcagt

SEQ ID NO: 3263 - DNA, 20 bp, synthetic construct
  misc_feature 1..20: note = Synthetic construct
  source 1..20: mol_type = other DNA
taccgcgacgagcggcagtg

SEQ ID NO: 3264 - DNA, 20 bp, synthetic construct
  misc_feature 1..20: note = Synthetic construct
  source 1..20: mol_type = other DNA
accgcgacgagcggcagtgt

SEQ ID NO: 3265 - DNA, 20 bp, synthetic construct
  misc_feature 1..20: note = Synthetic construct
  source 1..20: mol_type = other DNA
ccgcgacgagcggcagtgta

SEQ ID NO: 3266 - DNA, 20 bp, synthetic construct
  misc_feature 1..20: note = Synthetic construct
  source 1..20: mol_type = other DNA
cgcgacgagcggcagtgtac

SEQ ID NO: 3267 - DNA, 20 bp, synthetic construct
  misc_feature 1..20: note = Synthetic construct
  source 1..20: mol_type = other DNA
gcgacgagcggcagtgtacg

SEQ ID NO: 3268 - DNA, 20 bp, synthetic construct
  misc_feature 1..20: note = Synthetic construct
  source 1..20: mol_type = other DNA
cgacgagcggcagtgtacgc

SEQ ID NO: 3269 - DNA, 20 bp, synthetic construct
  misc_feature 1..20: note = Synthetic construct
  source 1..20: mol_type = other DNA
gacgagcggcagtgtacgcc

SEQ ID NO: 3270 - DNA, 20 bp, synthetic construct
  misc_feature 1..20: note = Synthetic construct
  source 1..20: mol_type = other DNA
acgagcggcagtgtacgcct

SEQ ID NO: 3271 - DNA, 20 bp, synthetic construct
  misc_feature 1..20: note = Synthetic construct
  source 1..20: mol_type = other DNA
cgagcggcagtgtacgcctt

SEQ ID NO: 3272 - DNA, 20 bp, synthetic construct
  misc_feature 1..20: note = Synthetic construct
  source 1..20: mol_type = other DNA
gagcggcagtgtacgccttc

SEQ ID NO: 3273 - DNA, 20 bp, synthetic construct
  misc_feature 1..20: note = Synthetic construct
  source 1..20: mol_type = other DNA
agcggcagtgtacgccttca

SEQ ID NO: 3274 - DNA, 20 bp, synthetic construct
  misc_feature 1..20: note = Synthetic construct
  source 1..20: mol_type = other DNA
gcggcagtgtacgccttcac

SEQ ID NO: 3275 - DNA, 20 bp, synthetic construct
  misc_feature 1..20: note = Synthetic construct
  source 1..20: mol_type = other DNA
cggcagtgtacgccttcacg

SEQ ID NO: 3276 - DNA, 20 bp, synthetic construct
  misc_feature 1..20: note = Synthetic construct
  source 1..20: mol_type = other DNA
ggcagtgtacgccttcacga

SEQ ID NO: 3277 - DNA, 20 bp, synthetic construct
  misc_feature 1..20: note = Synthetic construct
  source 1..20: mol_type = other DNA
gcagtgtacgccttcacgag

SEQ ID NO: 3278 - DNA, 20 bp, synthetic construct
  misc_feature 1..20: note = Synthetic construct
  source 1..20: mol_type = other DNA
cagtgtacgccttcacgagc

SEQ ID NO: 3279 - DNA, 20 bp, synthetic construct
  misc_feature 1..20: note = Synthetic construct
  source 1..20: mol_type = other DNA
agtgtacgccttcacgagcg

SEQ ID NO: 3280 - DNA, 20 bp, synthetic construct
  misc_feature 1..20: note = Synthetic construct
  source 1..20: mol_type = other DNA
gtgtacgccttcacgagcgc

SEQ ID NO: 3281 - DNA, 20 bp, synthetic construct
  misc_feature 1..20: note = Synthetic construct
  source 1..20: mol_type = other DNA
tgtacgccttcacgagcgca

SEQ ID NO: 3282 - DNA, 20 bp, synthetic construct
  misc_feature 1..20: note = Synthetic construct
  source 1..20: mol_type = other DNA
gtacgccttcacgagcgcaa

SEQ ID NO: 3283 - DNA, 20 bp, synthetic construct
  misc_feature 1..20: note = Synthetic construct
  source 1..20: mol_type = other DNA
tacgccttcacgagcgcaat

SEQ ID NO: 3284 - DNA, 20 bp, synthetic construct
  misc_feature 1..20: note = Synthetic construct
  source 1..20: mol_type = other DNA
acgccttcacgagcgcaatg

SEQ ID NO: 3285 - DNA, 20 bp, synthetic construct
  misc_feature 1..20: note = Synthetic construct
  source 1..20: mol_type = other DNA
cgccttcacgagcgcaatgg

SEQ ID NO: 3286 - DNA, 20 bp, synthetic construct
  misc_feature 1..20: note = Synthetic construct
  source 1..20: mol_type = other DNA
gccttcacgagcgcaatggt

SEQ ID NO: 3287 - DNA, 20 bp, synthetic construct
  misc_feature 1..20: note = Synthetic construct
  source 1..20: mol_type = other DNA
ccttcacgagcgcaatggtt

SEQ ID NO: 3288 - DNA, 20 bp, synthetic construct
  misc_feature 1..20: note = Synthetic construct
  source 1..20: mol_type = other DNA
cttcacgagcgcaatggttt

SEQ ID NO: 3289 - DNA, 20 bp, synthetic construct
  misc_feature 1..20: note = Synthetic construct
  source 1..20: mol_type = other DNA
ttcacgagcgcaatggtttg

SEQ ID NO: 3290 - DNA, 20 bp, synthetic construct
  misc_feature 1..20: note = Synthetic construct
  source 1..20: mol_type = other DNA
tcacgagcgcaatggtttgc

SEQ ID NO: 3291 - DNA, 20 bp, synthetic construct
  misc_feature 1..20: note = Synthetic construct
  source 1..20: mol_type = other DNA
cacgagcgcaatggtttgcg

SEQ ID NO: 3292 - DNA, 20 bp, synthetic construct
  misc_feature 1..20: note = Synthetic construct
  source 1..20: mol_type = other DNA
acgagcgcaatggtttgcgt

SEQ ID NO: 3293 - DNA, 20 bp, synthetic construct
  misc_feature 1..20: note = Synthetic construct
  source 1..20: mol_type = other DNA
cgagcgcaatggtttgcgtc

SEQ ID NO: 3294 - DNA, 20 bp, synthetic construct
  misc_feature 1..20: note = Synthetic construct
  source 1..20: mol_type = other DNA
gagcgcaatggtttgcgtcg

SEQ ID NO: 3295 - DNA, 20 bp, synthetic construct
  misc_feature 1..20: note = Synthetic construct
  source 1..20: mol_type = other DNA
agcgcaatggtttgcgtcgc

SEQ ID NO: 3296 - DNA, 20 bp, synthetic construct
  misc_feature 1..20: note = Synthetic construct
  source 1..20: mol_type = other DNA
gcgcaatggtttgcgtcgcg

SEQ ID NO: 3297 - DNA, 20 bp, synthetic construct
  misc_feature 1..20: note = Synthetic construct
  source 1..20: mol_type = other DNA
cgcaatggtttgcgtcgcga

SEQ ID NO: 3298 - DNA, 20 bp, synthetic construct
  misc_feature 1..20: note = Synthetic construct
  source 1..20: mol_type = other DNA
gcaatggtttgcgtcgcgag

SEQ ID NO: 3299 - DNA, 20 bp, synthetic construct
  misc_feature 1..20: note = Synthetic construct
  source 1..20: mol_type = other DNA
caatggtttgcgtcgcgagt

SEQ ID NO: 3300 - DNA, 20 bp, synthetic construct
  misc_feature 1..20: note = Synthetic construct
  source 1..20: mol_type = other DNA
aatggtttgcgtcgcgagtt

SEQ ID NO: 3301 - DNA, 20 bp, synthetic construct
  misc_feature 1..20: note = Synthetic construct
  source 1..20: mol_type = other DNA
atggtttgcgtcgcgagttg

SEQ ID NO: 3302 - DNA, 20 bp, synthetic construct
  misc_feature 1..20: note = Synthetic construct
  source 1..20: mol_type = other DNA
tggtttgcgtcgcgagttgt

SEQ ID NO: 3303 - DNA, 20 bp, synthetic construct
  misc_feature 1..20: note = Synthetic construct
  source 1..20: mol_type = other DNA
ggtttgcgtcgcgagttgtg

SEQ ID NO: 3304 - DNA, 20 bp, synthetic construct
  misc_feature 1..20: note = Synthetic construct
  source 1..20: mol_type = other DNA
gtttgcgtcgcgagttgtga

SEQ ID NO: 3305 - DNA, 20 bp, synthetic construct
  misc_feature 1..20: note = Synthetic construct
  source 1..20: mol_type = other DNA
tttgcgtcgcgagttgtgag

SEQ ID NO: 3306 - DNA, 20 bp, synthetic construct
  misc_feature 1..20: note = Synthetic construct
  source 1..20: mol_type = other DNA
ttgcgtcgcgagttgtgagg

SEQ ID NO: 3307 - DNA, 20 bp, synthetic construct
  misc_feature 1..20: note = Synthetic construct
  source 1..20: mol_type = other DNA
tgcgtcgcgagttgtgaggc

SEQ ID NO: 3308 - DNA, 20 bp, synthetic construct
  misc_feature 1..20: note = Synthetic construct
  source 1..20: mol_type = other DNA
gcgtcgcgagttgtgaggct

SEQ ID NO: 3309 - DNA, 20 bp, synthetic construct
  misc_feature 1..20: note = Synthetic construct
  source 1..20: mol_type = other DNA
cgtcgcgagttgtgaggctg

SEQ ID NO: 3310 - DNA, 20 bp, synthetic construct
  misc_feature 1..20: note = Synthetic construct
  source 1..20: mol_type = other DNA
gtcgcgagttgtgaggctgt

SEQ ID NO: 3311 - DNA, 20 bp, synthetic construct
  misc_feature 1..20: note = Synthetic construct
  source 1..20: mol_type = other DNA
tcgcgagttgtgaggctgtc

SEQ ID NO: 3312 - DNA, 20 bp, synthetic construct
  misc_feature 1..20: note = Synthetic construct
  source 1..20: mol_type = other DNA
cgcgagttgtgaggctgtcg

SEQ ID NO: 3313 - DNA, 20 bp, synthetic construct
  misc_feature 1..20: note = Synthetic construct
  source 1..20: mol_type = other DNA
gcgagttgtgaggctgtcga

SEQ ID NO: 3314 - DNA, 20 bp, synthetic construct
  misc_feature 1..20: note = Synthetic construct
  source 1..20: mol_type = other DNA
cgagttgtgaggctgtcgac

SEQ ID NO: 3315 - DNA, 20 bp, synthetic construct
  misc_feature 1..20: note = Synthetic construct
  source 1..20: mol_type = other DNA
gagttgtgaggctgtcgacc

SEQ ID NO: 3316 - DNA, 20 bp, synthetic construct
  misc_feature 1..20: note = Synthetic construct
  source 1..20: mol_type = other DNA
agttgtgaggctgtcgacct

SEQ ID NO: 3317 - DNA, 20 bp, synthetic construct
  misc_feature 1..20: note = Synthetic construct
  source 1..20: mol_type = other DNA
gttgtgaggctgtcgacctg

SEQ ID NO: 3318 - DNA, 20 bp, synthetic construct
  misc_feature 1..20: note = Synthetic construct
  source 1..20: mol_type = other DNA
ttgtgaggctgtcgacctgg

SEQ ID NO: 3319 - DNA, 20 bp, synthetic construct
  misc_feature 1..20: note = Synthetic construct
  source 1..20: mol_type = other DNA
tgtgaggctgtcgacctggc

SEQ ID NO: 3320 - DNA, 20 bp, synthetic construct
  misc_feature 1..20: note = Synthetic construct
  source 1..20: mol_type = other DNA
gtgaggctgtcgacctggcc

SEQ ID NO: 3321 - DNA, 20 bp, synthetic construct
  misc_feature 1..20: note = Synthetic construct
  source 1..20: mol_type = other DNA
tgaggctgtcgacctggcct

SEQ ID NO: 3322 - DNA, 20 bp, synthetic construct
  misc_feature 1..20: note = Synthetic construct
  source 1..20: mol_type = other DNA
gaggctgtcgacctggcctc

SEQ ID NO: 3323 - DNA, 20 bp, synthetic construct
  misc_feature 1..20: note = Synthetic construct
  source 1..20: mol_type = other DNA
aggctgtcgacctggcctct

SEQ ID NO: 3324 - DNA, 20 bp, synthetic construct
  misc_feature 1..20: note = Synthetic construct
  source 1..20: mol_type = other DNA
ggctgtcgacctggcctctg

SEQ ID NO: 3325 - DNA, 20 bp, synthetic construct
  misc_feature 1..20: note = Synthetic construct
  source 1..20: mol_type = other DNA
gctgtcgacctggcctctgc

SEQ ID NO: 3326 - DNA, 20 bp, synthetic construct
  misc_feature 1..20: note = Synthetic construct
  source 1..20: mol_type = other DNA
ctgtcgacctggcctctgct

SEQ ID NO: 3327 - DNA, 20 bp, synthetic construct
  misc_feature 1..20: note = Synthetic construct
  source 1..20: mol_type = other DNA
tgtcgacctggcctctgcta

SEQ ID NO: 3328 - DNA, 20 bp, synthetic construct
  misc_feature 1..20: note = Synthetic construct
  source 1..20: mol_type = other DNA
gtcgacctggcctctgctaa

SEQ ID NO: 3329 - DNA, 20 bp, synthetic construct
  misc_feature 1..20: note = Synthetic construct
  source 1..20: mol_type = other DNA
tcgacctggcctctgctaaa

SEQ ID NO: 3330 - DNA, 20 bp, synthetic construct
  misc_feature 1..20: note = Synthetic construct
  source 1..20: mol_type = other DNA
cgacctggcctctgctaaag

SEQ ID NO: 3331 - DNA, 20 bp, synthetic construct
  misc_feature 1..20: note = Synthetic construct
  source 1..20: mol_type = other DNA
gacctggcctctgctaaagc

SEQ ID NO: 3332 - DNA, 20 bp, synthetic construct
  misc_feature 1..20: note = Synthetic construct
  source 1..20: mol_type = other DNA
acctggcctctgctaaagca

SEQ ID NO: 3333 - DNA, 20 bp, synthetic construct
  misc_feature 1..20: note = Synthetic construct
  source 1..20: mol_type = other DNA
cctggcctctgctaaagcaa

SEQ ID NO: 3334 - DNA, 20 bp, synthetic construct
  misc_feature 1..20: note = Synthetic construct
  source 1..20: mol_type = other DNA
ctggcctctgctaaagcaac

SEQ ID NO: 3335 - DNA, 20 bp, synthetic construct
  misc_feature 1..20: note = Synthetic construct
  source 1..20: mol_type = other DNA
tggcctctgctaaagcaaca

SEQ ID NO: 3336 - DNA, 20 bp, synthetic construct
  misc_feature 1..20: note = Synthetic construct
  source 1..20: mol_type = other DNA
ggcctctgctaaagcaacac

SEQ ID NO: 3337 - DNA, 20 bp, synthetic construct
  misc_feature 1..20: note = Synthetic construct
  source 1..20: mol_type = other DNA
gcctctgctaaagcaacacc

SEQ ID NO: 3338 - DNA, 20 bp, synthetic construct
  misc_feature 1..20: note = Synthetic construct
  source 1..20: mol_type = other DNA
cctctgctaaagcaacacca

SEQ ID NO: 3339 - DNA, 20 bp, synthetic construct
  misc_feature 1..20: note = Synthetic construct
  source 1..20: mol_type = other DNA
ctctgctaaagcaacaccaa

SEQ ID NO: 3340 - DNA, 20 bp, synthetic construct
  misc_feature 1..20: note = Synthetic construct
  source 1..20: mol_type = other DNA
tctgctaaagcaacaccaag

SEQ ID NO: 3341 - DNA, 20 bp, synthetic construct
  misc_feature 1..20: note = Synthetic construct
  source 1..20: mol_type = other DNA
ctgctaaagcaacaccaagg

SEQ ID NO: 3342 - DNA, 20 bp, synthetic construct
  misc_feature 1..20: note = Synthetic construct
  source 1..20: mol_type = other DNA
tgctaaagcaacaccaaggt

SEQ ID NO: 3343 - DNA, 20 bp, synthetic construct
  misc_feature 1..20: note = Synthetic construct
  source 1..20: mol_type = other DNA
gctaaagcaacaccaaggtt

SEQ ID NO: 3344 - DNA, 20 bp, synthetic construct
  misc_feature 1..20: note = Synthetic construct
  source 1..20: mol_type = other DNA
ctaaagcaacaccaaggtta

SEQ ID NO: 3345 - DNA, 20 bp, synthetic construct
  misc_feature 1..20: note = Synthetic construct
  source 1..20: mol_type = other DNA
taaagcaacaccaaggttaa

SEQ ID NO: 3346 - DNA, 20 bp, synthetic construct
  misc_feature 1..20: note = Synthetic construct
  source 1..20: mol_type = other DNA
aaagcaacaccaaggttaaa

SEQ ID NO: 3347 - DNA, 20 bp, synthetic construct
  misc_feature 1..20: note = Synthetic construct
  source 1..20: mol_type = other DNA
aagcaacaccaaggttaaaa

SEQ ID NO: 3348 - DNA, 20 bp, synthetic construct
  misc_feature 1..20: note = Synthetic construct
  source 1..20: mol_type = other DNA
agcaacaccaaggttaaaat

SEQ ID NO: 3349 - DNA, 20 bp, synthetic construct
  misc_feature 1..20: note = Synthetic construct
  source 1..20: mol_type = other DNA
gcaacaccaaggttaaaatt

SEQ ID NO: 3350 - DNA, 20 bp, synthetic construct
  misc_feature 1..20: note = Synthetic construct
  source 1..20: mol_type = other DNA
caacaccaaggttaaaatta

SEQ ID NO: 3351 - DNA, 20 bp, synthetic construct
  misc_feature 1..20: note = Synthetic construct
  source 1..20: mol_type = other DNA
aacaccaaggttaaaattac

SEQ ID NO: 3352 - DNA, 20 bp, synthetic construct
  misc_feature 1..20: note = Synthetic construct
  source 1..20: mol_type = other DNA
acaccaaggttaaaattacc

SEQ ID NO: 3353 - DNA, 20 bp, synthetic construct
  misc_feature 1..20: note = Synthetic construct
  source 1..20: mol_type = other DNA
caccaaggttaaaattaccc

SEQ ID NO: 3354 - DNA, 20 bp, synthetic construct
  misc_feature 1..20: note = Synthetic construct
  source 1..20: mol_type = other DNA
accaaggttaaaattaccct

SEQ ID NO: 3355 - DNA, 20 bp, synthetic construct
  misc_feature 1..20: note = Synthetic construct
  source 1..20: mol_type = other DNA
ccaaggttaaaattaccctg

SEQ ID NO: 3356 - DNA, 20 bp, synthetic construct
  misc_feature 1..20: note = Synthetic construct
  source 1..20: mol_type = other DNA
caaggttaaaattaccctgg

SEQ ID NO: 3357 - DNA, 20 bp, synthetic construct
  misc_feature 1..20: note = Synthetic construct
  source 1..20: mol_type = other DNA
aaggttaaaattaccctggg

SEQ ID NO: 3358 - DNA, 20 bp, synthetic construct
  misc_feature 1..20: note = Synthetic construct
  source 1..20: mol_type = other DNA
aggttaaaattaccctgggt

SEQ ID NO: 3359 - DNA, 20 bp, synthetic construct
  misc_feature 1..20: note = Synthetic construct
  source 1..20: mol_type = other DNA
ggttaaaattaccctgggtg

SEQ ID NO: 3360 - DNA, 20 bp, synthetic construct
  misc_feature 1..20: note = Synthetic construct
  source 1..20: mol_type = other DNA
gttaaaattaccctgggtga

SEQ ID NO: 3361 - DNA, 20 bp, synthetic construct
  misc_feature 1..20: note = Synthetic construct
  source 1..20: mol_type = other DNA
ttaaaattaccctgggtgac

SEQ ID NO: 3362 - DNA, 20 bp, synthetic construct
  misc_feature 1..20: note = Synthetic construct
  source 1..20: mol_type = other DNA
taaaattaccctgggtgacc

SEQ ID NO: 3363 - DNA, 20 bp, synthetic construct
  misc_feature 1..20: note = Synthetic construct
  source 1..20: mol_type = other DNA
aaaattaccctgggtgacct

SEQ ID NO: 3364 - DNA, 20 bp, synthetic construct
  misc_feature 1..20: note = Synthetic construct
  source 1..20: mol_type = other DNA
aaattaccctgggtgacctt

SEQ ID NO: 3365 - DNA, 20 bp, synthetic construct
  misc_feature 1..20: note = Synthetic construct
  source 1..20: mol_type = other DNA
aattaccctgggtgaccttt

SEQ ID NO: 3366 - DNA, 20 bp, synthetic construct
  misc_feature 1..20: note = Synthetic construct
  source 1..20: mol_type = other DNA
attaccctgggtgacctttt

SEQ ID NO: 3367 - DNA, 20 bp, synthetic construct
  misc_feature 1..20: note = Synthetic construct
  source 1..20: mol_type = other DNA
ttaccctgggtgaccttttg

SEQ ID NO: 3368 - DNA, 20 bp, synthetic construct
  misc_feature 1..20: note = Synthetic construct
  source 1..20: mol_type = other DNA
taccctgggtgaccttttgc

SEQ ID NO: 3369 - DNA, 20 bp, synthetic construct
  misc_feature 1..20: note = Synthetic construct
  source 1..20: mol_type = other DNA
accctgggtgaccttttgca

SEQ ID NO: 3370 - DNA, 20 bp, synthetic construct
  misc_feature 1..20: note = Synthetic construct
  source 1..20: mol_type = other DNA
ccctgggtgaccttttgcag

SEQ ID NO: 3371 - DNA, 20 bp, synthetic construct
  misc_feature 1..20: note = Synthetic construct
  source 1..20: mol_type = other DNA
cctgggtgaccttttgcagg

SEQ ID NO: 3372 - DNA, 20 bp, synthetic construct
  misc_feature 1..20: note = Synthetic construct
  source 1..20: mol_type = other DNA
ctgggtgaccttttgcagga

SEQ ID NO: 3373 - DNA, 20 bp, synthetic construct
  misc_feature 1..20: note = Synthetic construct
  source 1..20: mol_type = other DNA
tgggtgaccttttgcaggac

SEQ ID NO: 3374 - DNA, 20 bp, synthetic construct
  misc_feature 1..20: note = Synthetic construct
  source 1..20: mol_type = other DNA
gggtgaccttttgcaggact

SEQ ID NO: 3375 - DNA, 20 bp, synthetic construct
  misc_feature 1..20: note = Synthetic construct
  source 1..20: mol_type = other DNA
ggtgaccttttgcaggactt

SEQ ID NO: 3376 - DNA, 20 bp, synthetic construct
  misc_feature 1..20: note = Synthetic construct
  source 1..20: mol_type = other DNA
gtgaccttttgcaggacttc

SEQ ID NO: 3377 - DNA, 20 bp, synthetic construct
  misc_feature 1..20: note = Synthetic construct
  source 1..20: mol_type = other DNA
tgaccttttgcaggacttcg

SEQ ID NO: 3378 - DNA, 20 bp, synthetic construct
  misc_feature 1..20: note = Synthetic construct
  source 1..20: mol_type = other DNA
gaccttttgcaggacttcgg

SEQ ID NO: 3379 - DNA, 20 bp, synthetic construct
  misc_feature 1..20: note = Synthetic construct
  source 1..20: mol_type = other DNA
accttttgcaggacttcggt

SEQ ID NO: 3380 - DNA, 20 bp, synthetic construct
  misc_feature 1..20: note = Synthetic construct
  source 1..20: mol_type = other DNA
ccttttgcaggacttcggtc

SEQ ID NO: 3381 - DNA, 20 bp, synthetic construct
  misc_feature 1..20: note = Synthetic construct
  source 1..20: mol_type = other DNA
cttttgcaggacttcggtcg

SEQ ID NO: 3382 - DNA, 20 bp, synthetic construct
  misc_feature 1..20: note = Synthetic construct
  source 1..20: mol_type = other DNA
ttttgcaggacttcggtcga

SEQ ID NO: 3383 - DNA, 20 bp, synthetic construct
  misc_feature 1..20: note = Synthetic construct
  source 1..20: mol_type = other DNA
tttgcaggacttcggtcgac

SEQ ID NO: 3384 - DNA, 20 bp, synthetic construct
  misc_feature 1..20: note = Synthetic construct
  source 1..20: mol_type = other DNA
ttgcaggacttcggtcgacg

SEQ ID NO: 3385 - DNA, 20 bp, synthetic construct
  misc_feature 1..20: note = Synthetic construct
  source 1..20: mol_type = other DNA
tgcaggacttcggtcgacgc

SEQ ID NO: 3386 - DNA, 20 bp, synthetic construct
  misc_feature 1..20: note = Synthetic construct
  source 1..20: mol_type = other DNA
gcaggacttcggtcgacgcc

SEQ ID NO: 3387 - DNA, 20 bp, synthetic construct
  misc_feature 1..20: note = Synthetic construct
  source 1..20: mol_type = other DNA
caggacttcggtcgacgccc

SEQ ID NO: 3388 - DNA, 20 bp, synthetic construct
  misc_feature 1..20: note = Synthetic construct
  source 1..20: mol_type = other DNA
aggacttcggtcgacgcccg

SEQ ID NO: 3389 - DNA, 20 bp, synthetic construct
  misc_feature 1..20: note = Synthetic construct
  source 1..20: mol_type = other DNA
ggacttcggtcgacgcccgg

SEQ ID NO: 3390 - DNA, 20 bp, synthetic construct
  misc_feature 1..20: note = Synthetic construct
  source 1..20: mol_type = other DNA
gacttcggtcgacgcccggt

SEQ ID NO: 3391 - DNA, 20 bp, synthetic construct
  misc_feature 1..20: note = Synthetic construct
  source 1..20: mol_type = other DNA
acttcggtcgacgcccggtt

SEQ ID NO: 3392 - DNA, 20 bp, synthetic construct
  misc_feature 1..20: note = Synthetic construct
  source 1..20: mol_type = other DNA
cttcggtcgacgcccggttc

SEQ ID NO: 3393 - DNA, 20 bp, synthetic construct
  misc_feature 1..20: note = Synthetic construct
  source 1..20: mol_type = other DNA
ttcggtcgacgcccggttcg

SEQ ID NO: 3394 - DNA, 20 bp, synthetic construct
  misc_feature 1..20: note = Synthetic construct
  source 1..20: mol_type = other DNA
tcggtcgacgcccggttcgc

SEQ ID NO: 3395 - DNA, 20 bp, synthetic construct
  misc_feature 1..20: note = Synthetic construct
  source 1..20: mol_type = other DNA
cggtcgacgcccggttcgca

SEQ ID NO: 3396 - DNA, 20 bp, synthetic construct
  misc_feature 1..20: note = Synthetic construct
  source 1..20: mol_type = other DNA
ggtcgacgcccggttcgcaa

SEQ ID NO: 3397 - DNA, 20 bp, synthetic construct
  misc_feature 1..20: note = Synthetic construct
  source 1..20: mol_type = other DNA
gtcgacgcccggttcgcaac

SEQ ID NO: 3398 - DNA, 20 bp, synthetic construct
  misc_feature 1..20: note = Synthetic construct
  source 1..20: mol_type = other DNA
tcgacgcccggttcgcaacg

SEQ ID NO: 3399 - DNA, 20 bp, synthetic construct
  misc_feature 1..20: note = Synthetic construct
  source 1..20: mol_type = other DNA
cgacgcccggttcgcaacgt

SEQ ID NO: 3400 - DNA, 20 bp, synthetic construct
  misc_feature 1..20: note = Synthetic construct
  source 1..20: mol_type = other DNA
gacgcccggttcgcaacgtt

SEQ ID NO: 3401 - DNA, 20 bp, synthetic construct
  misc_feature 1..20: note = Synthetic construct
  source 1..20: mol_type = other DNA
acgcccggttcgcaacgttc

SEQ ID NO: 3402 - DNA, 20 bp, synthetic construct
  misc_feature 1..20: note = Synthetic construct
  source 1..20: mol_type = other DNA
cgcccggttcgcaacgttct

SEQ ID NO: 3403 - DNA, 20 bp, synthetic construct
  misc_feature 1..20: note = Synthetic construct
  source 1..20: mol_type = other DNA
gcccggttcgcaacgttctg

SEQ ID NO: 3404 - DNA, 20 bp, synthetic construct
  misc_feature 1..20: note = Synthetic construct
  source 1..20: mol_type = other DNA
cccggttcgcaacgttctgc

SEQ ID NO: 3405 - DNA, 20 bp, synthetic construct
  misc_feature 1..20: note = Synthetic construct
  source 1..20: mol_type = other DNA
ccggttcgcaacgttctgcg

SEQ ID NO: 3406 - DNA, 20 bp, synthetic construct
  misc_feature 1..20: note = Synthetic construct
  source 1..20: mol_type = other DNA
cggttcgcaacgttctgcgg

SEQ ID NO: 3407 - DNA, 20 bp, synthetic construct
  misc_feature 1..20: note = Synthetic construct
  source 1..20: mol_type = other DNA
ggttcgcaacgttctgcggc

SEQ ID NO: 3408 - DNA, 20 bp, synthetic construct
  misc_feature 1..20: note = Synthetic construct
  source 1..20: mol_type = other DNA
gttcgcaacgttctgcggca

SEQ ID NO: 3409 - DNA, 20 bp, synthetic construct
  misc_feature 1..20: note = Synthetic construct
  source 1..20: mol_type = other DNA
ttcgcaacgttctgcggcac

SEQ ID NO: 3410 - DNA, 20 bp, synthetic construct
  misc_feature 1..20: note = Synthetic construct
  source 1..20: mol_type = other DNA
tcgcaacgttctgcggcact

SEQ ID NO: 3411 - DNA, 20 bp, synthetic construct
  misc_feature 1..20: note = Synthetic construct
  source 1..20: mol_type = other DNA
cgcaacgttctgcggcactt

SEQ ID NO: 3412 - DNA, 20 bp, synthetic construct
  misc_feature 1..20: note = Synthetic construct
  source 1..20: mol_type = other DNA
gcaacgttctgcggcacttc

SEQ ID NO: 3413 - DNA, 20 bp, synthetic construct
  misc_feature 1..20: note = Synthetic construct
  source 1..20: mol_type = other DNA
caacgttctgcggcacttcg

SEQ ID NO: 3414 - DNA, 20 bp, synthetic construct
  misc_feature 1..20: note = Synthetic construct
  source 1..20: mol_type = other DNA
aacgttctgcggcacttcga

SEQ ID NO: 3415 - DNA, 20 bp, synthetic construct
  misc_feature 1..20: note = Synthetic construct
  source 1..20: mol_type = other DNA
acgttctgcggcacttcgat

SEQ ID NO: 3416 - DNA, 20 bp, synthetic construct
  misc_feature 1..20: note = Synthetic construct
  source 1..20: mol_type = other DNA
cgttctgcggcacttcgatg

SEQ ID NO: 3417 - DNA, 20 bp, synthetic construct
  misc_feature 1..20: note = Synthetic construct
  source 1..20: mol_type = other DNA
gttctgcggcacttcgatgt

SEQ ID NO: 3418 - DNA, 20 bp, synthetic construct
  misc_feature 1..20: note = Synthetic construct
  source 1..20: mol_type = other DNA
ttctgcggcacttcgatgta

SEQ ID NO: 3419 - DNA, 20 bp, synthetic construct
  misc_feature 1..20: note = Synthetic construct
  source 1..20: mol_type = other DNA
tctgcggcacttcgatgtaa

SEQ ID NO: 3420 - DNA, 20 bp, synthetic construct
  misc_feature 1..20: note = Synthetic construct
  source 1..20: mol_type = other DNA
ctgcggcacttcgatgtaag

SEQ ID NO: 3421 - DNA, 20 bp, synthetic construct
  misc_feature 1..20: note = Synthetic construct
  source 1..20: mol_type = other DNA
tgcggcacttcgatgtaagt

SEQ ID NO: 3422 - DNA, 20 bp, synthetic construct
  misc_feature 1..20: note = Synthetic construct
  source 1..20: mol_type = other DNA
gcggcacttcgatgtaagtc

SEQ ID NO: 3423 - DNA, 20 bp, synthetic construct
  misc_feature 1..20: note = Synthetic construct
  source 1..20: mol_type = other DNA
cggcacttcgatgtaagtca

SEQ ID NO: 3424 - DNA, 20 bp, synthetic construct
  misc_feature 1..20: note = Synthetic construct
  source 1..20: mol_type = other DNA
ggcacttcgatgtaagtcaa

SEQ ID NO: 3425 - DNA, 20 bp, synthetic construct
  misc_feature 1..20: note = Synthetic construct
  source 1..20: mol_type = other DNA
gcacttcgatgtaagtcaag

SEQ ID NO: 3426 - DNA, 20 bp, synthetic construct
  misc_feature 1..20: note = Synthetic construct
  source 1..20: mol_type = other DNA
cacttcgatgtaagtcaagt

SEQ ID NO: 3427 - DNA, 20 bp, synthetic construct
  misc_feature 1..20: note = Synthetic construct
  source 1..20: mol_type = other DNA
acttcgatgtaagtcaagtt

SEQ ID NO: 3428 - DNA, 20 bp, synthetic construct
  misc_feature 1..20: note = Synthetic construct
  source 1..20: mol_type = other DNA
cttcgatgtaagtcaagttt

SEQ ID NO: 3429 - DNA, 20 bp, synthetic construct
  misc_feature 1..20: note = Synthetic construct
  source 1..20: mol_type = other DNA
ttcgatgtaagtcaagtttt

SEQ ID NO: 3430 - DNA, 20 bp, synthetic construct
  misc_feature 1..20: note = Synthetic construct
  source 1..20: mol_type = other DNA
tcgatgtaagtcaagttttg

SEQ ID NO: 3431 - DNA, 20 bp, synthetic construct
  misc_feature 1..20: note = Synthetic construct
  source 1..20: mol_type = other DNA
cgatgtaagtcaagttttgg

SEQ ID NO: 3432 - DNA, 20 bp, synthetic construct
  misc_feature 1..20: note = Synthetic construct
  source 1..20: mol_type = other DNA
gatgtaagtcaagttttggc

SEQ ID NO: 3433 - DNA, 20 bp, synthetic construct
  misc_feature 1..20: note = Synthetic construct
  source 1..20: mol_type = other DNA
atgtaagtcaagttttggct

SEQ ID NO: 3434 - DNA, 20 bp, synthetic construct
  misc_feature 1..20: note = Synthetic construct
  source 1..20: mol_type = other DNA
tgtaagtcaagttttggctt

SEQ ID NO: 3435 - DNA, 20 bp, synthetic construct
  misc_feature 1..20: note = Synthetic construct
  source 1..20: mol_type = other DNA
gtaagtcaagttttggctta

SEQ ID NO: 3436 - DNA, 20 bp, synthetic construct
  misc_feature 1..20: note = Synthetic construct
  source 1..20: mol_type = other DNA
taagtcaagttttggcttac

SEQ ID NO: 3437 - DNA, 20 bp, synthetic construct
  misc_feature 1..20: note = Synthetic construct
  source 1..20: mol_type = other DNA
aagtcaagttttggcttaca

SEQ ID NO: 3438 - DNA, 20 bp, synthetic construct
  misc_feature 1..20: note = Synthetic construct
  source 1..20: mol_type = other DNA
agtcaagttttggcttacag

SEQ ID NO: 3439 - DNA, 20 bp, synthetic construct
  misc_feature 1..20: note = Synthetic construct
  source 1..20: mol_type = other DNA
gtcaagttttggcttacagg

SEQ ID NO: 3440 - DNA, 20 bp, synthetic construct
  misc_feature 1..20: note = Synthetic construct
  source 1..20: mol_type = other DNA
tcaagttttggcttacaggg

SEQ ID NO: 3441 - DNA, 20 bp, synthetic construct
  misc_feature 1..20: note = Synthetic construct
  source 1..20: mol_type = other DNA
caagttttggcttacaggga

SEQ ID NO: 3442 - DNA, 20 bp, synthetic construct
  misc_feature 1..20: note = Synthetic construct
  source 1..20: mol_type = other DNA
aagttttggcttacagggaa

SEQ ID NO: 3443 - DNA, 20 bp, synthetic construct
  misc_feature 1..20: note = Synthetic construct
  source 1..20: mol_type = other DNA
agttttggcttacagggaag

SEQ ID NO: 3444 - DNA, 20 bp, synthetic construct
  misc_feature 1..20: note = Synthetic construct
  source 1..20: mol_type = other DNA
gttttggcttacagggaaga

SEQ ID NO: 3445 - DNA, 20 bp, synthetic construct
  misc_feature 1..20: note = Synthetic construct
  source 1..20: mol_type = other DNA
ttttggcttacagggaagag

SEQ ID NO: 3446 - DNA, 20 bp, synthetic construct
  misc_feature 1..20: note = Synthetic construct
  source 1..20: mol_type = other DNA
tttggcttacagggaagagg

SEQ ID NO: 3447 - DNA, 20 bp, synthetic construct
  misc_feature 1..20: note = Synthetic construct
  source 1..20: mol_type = other DNA
ttggcttacagggaagaggc

SEQ ID NO: 3448 - DNA, 20 bp, synthetic construct
  misc_feature 1..20: note = Synthetic construct
  source 1..20: mol_type = other DNA
tggcttacagggaagaggct

SEQ ID NO: 3449 - DNA, 20 bp, synthetic construct
  misc_feature 1..20: note = Synthetic construct
  source 1..20: mol_type = other DNA
ggcttacagggaagaggctg

SEQ ID NO: 3450 - DNA, 20 bp, synthetic construct
  misc_feature 1..20: note = Synthetic construct
  source 1..20: mol_type = other DNA
gcttacagggaagaggctgt

SEQ ID NO: 3451 - DNA, 20 bp, synthetic construct
  misc_feature 1..20: note = Synthetic construct
  source 1..20: mol_type = other DNA
cttacagggaagaggctgta

SEQ ID NO: 3452 - DNA, 20 bp, synthetic construct
  misc_feature 1..20: note = Synthetic construct
  source 1..20: mol_type = other DNA
ttacagggaagaggctgtag

SEQ ID NO: 3453 - DNA, 20 bp, synthetic construct
  misc_feature 1..20: note = Synthetic construct
  source 1..20: mol_type = other DNA
tacagggaagaggctgtagc

SEQ ID NO: 3454 - DNA, 20 bp, synthetic construct
  misc_feature 1..20: note = Synthetic construct
  source 1..20: mol_type = other DNA
acagggaagaggctgtagca

SEQ ID NO: 3455 - DNA, 20 bp, synthetic construct
  misc_feature 1..20: note = Synthetic construct
  source 1..20: mol_type = other DNA
cagggaagaggctgtagcag

SEQ ID NO: 3456 - DNA, 20 bp, synthetic construct
  misc_feature 1..20: note = Synthetic construct
  source 1..20: mol_type = other DNA
agggaagaggctgtagcagg

SEQ ID NO: 3457 - DNA, 20 bp, synthetic construct
  misc_feature 1..20: note = Synthetic construct
  source 1..20: mol_type = other DNA
gggaagaggctgtagcagga

SEQ ID NO: 3458 - DNA, 20 bp, synthetic construct
  misc_feature 1..20: note = Synthetic construct
  source 1..20: mol_type = other DNA
ggaagaggctgtagcaggag

SEQ ID NO: 3459 - DNA, 20 bp, synthetic construct
  misc_feature 1..20: note = Synthetic construct
  source 1..20: mol_type = other DNA
gaagaggctgtagcaggagc

SEQ ID NO: 3460 - DNA, 20 bp, synthetic construct
  misc_feature 1..20: note = Synthetic construct
  source 1..20: mol_type = other DNA
aagaggctgtagcaggagcg

SEQ ID NO: 3461 - DNA, 20 bp, synthetic construct
  misc_feature 1..20: note = Synthetic construct
  source 1..20: mol_type = other DNA
agaggctgtagcaggagcgt

SEQ ID NO: 3462 - DNA, 20 bp, synthetic construct
  misc_feature 1..20: note = Synthetic construct
  source 1..20: mol_type = other DNA
gaggctgtagcaggagcgtg

SEQ ID NO: 3463 - DNA, 20 bp, synthetic construct
  misc_feature 1..20: note = Synthetic construct
  source 1..20: mol_type = other DNA
aggctgtagcaggagcgtgc

SEQ ID NO: 3464 - DNA, 20 bp, synthetic construct
  misc_feature 1..20: note = Synthetic construct
  source 1..20: mol_type = other DNA
ggctgtagcaggagcgtgcg

SEQ ID NO: 3465 - DNA, 20 bp, synthetic construct
  misc_feature 1..20: note = Synthetic construct
  source 1..20: mol_type = other DNA
gctgtagcaggagcgtgcgt

SEQ ID NO: 3466 - DNA, 20 bp, synthetic construct
  misc_feature 1..20: note = Synthetic construct
  source 1..20: mol_type = other DNA
ctgtagcaggagcgtgcgtc

SEQ ID NO: 3467 - DNA, 20 bp, synthetic construct
  misc_feature 1..20: note = Synthetic construct
  source 1..20: mol_type = other DNA
tgtagcaggagcgtgcgtcg

SEQ ID NO: 3468 - DNA, 20 bp, synthetic construct
  misc_feature 1..20: note = Synthetic construct
  source 1..20: mol_type = other DNA
gtagcaggagcgtgcgtcga

SEQ ID NO: 3469 - DNA, 20 bp, synthetic construct
  misc_feature 1..20: note = Synthetic construct
  source 1..20: mol_type = other DNA
tagcaggagcgtgcgtcgag

SEQ ID NO: 3470 - DNA, 20 bp, synthetic construct
  misc_feature 1..20: note = Synthetic construct
  source 1..20: mol_type = other DNA
agcaggagcgtgcgtcgagg

SEQ ID NO: 3471 - DNA, 20 bp, synthetic construct
  misc_feature 1..20: note = Synthetic construct
  source 1..20: mol_type = other DNA
gcaggagcgtgcgtcgaggg

SEQ ID NO: 3472 - DNA, 20 bp, synthetic construct
  misc_feature 1..20: note = Synthetic construct
  source 1..20: mol_type = other DNA
caggagcgtgcgtcgaggga

SEQ ID NO: 3473 - DNA, 20 bp, synthetic construct
  misc_feature 1..20: note = Synthetic construct
  source 1..20: mol_type = other DNA
aggagcgtgcgtcgagggag

SEQ ID NO: 3474 - DNA, 20 bp, synthetic construct
  misc_feature 1..20: note = Synthetic construct
  source 1..20: mol_type = other DNA
ggagcgtgcgtcgagggaga

SEQ ID NO: 3475 - DNA, 20 bp, synthetic construct
  misc_feature 1..20: note = Synthetic construct
  source 1..20: mol_type = other DNA
gagcgtgcgtcgagggagaa

SEQ ID NO: 3476 - DNA, 20 bp, synthetic construct
  misc_feature 1..20: note = Synthetic construct
  source 1..20: mol_type = other DNA
agcgtgcgtcgagggagaag

SEQ ID NO: 3477 - DNA, 20 bp, synthetic construct
  misc_feature 1..20: note = Synthetic construct
  source 1..20: mol_type = other DNA
gcgtgcgtcgagggagaagc

SEQ ID NO: 3478 - DNA, 20 bp, synthetic construct
  misc_feature 1..20: note = Synthetic construct
  source 1..20: mol_type = other DNA
cgtgcgtcgagggagaagcc

SEQ ID NO: 3479 - DNA, 20 bp, synthetic construct
  misc_feature 1..20: note = Synthetic construct
  source 1..20: mol_type = other DNA
gtgcgtcgagggagaagccg

SEQ ID NO: 3480 - DNA, 20 bp, synthetic construct
  misc_feature 1..20: note = Synthetic construct
  source 1..20: mol_type = other DNA
tgcgtcgagggagaagccga

SEQ ID NO: 3481 - DNA, 20 bp, synthetic construct
  misc_feature 1..20: note = Synthetic construct
  source 1..20: mol_type = other DNA
gcgtcgagggagaagccgaa

SEQ ID NO: 3482 - DNA, 20 bp, synthetic construct
  misc_feature 1..20: note = Synthetic construct
  source 1..20: mol_type = other DNA
cgtcgagggagaagccgaaa

SEQ ID NO: 3483 - DNA, 20 bp, synthetic construct
  misc_feature 1..20: note = Synthetic construct
  source 1..20: mol_type = other DNA
gtcgagggagaagccgaaac

SEQ ID NO: 3484 - DNA, 20 bp, synthetic construct
  misc_feature 1..20: note = Synthetic construct
  source 1..20: mol_type = other DNA
tcgagggagaagccgaaacc

SEQ ID NO: 3485 - DNA, 20 bp, synthetic construct
  misc_feature 1..20: note = Synthetic construct
  source 1..20: mol_type = other DNA
cgagggagaagccgaaaccg

SEQ ID NO: 3486 - DNA, 20 bp, synthetic construct
  misc_feature 1..20: note = Synthetic construct
  source 1..20: mol_type = other DNA
gagggagaagccgaaaccgg

SEQ ID NO: 3487 - DNA, 20 bp, synthetic construct
  misc_feature 1..20: note = Synthetic construct
  source 1..20: mol_type = other DNA
agggagaagccgaaaccggc

SEQ ID NO: 3488 - DNA, 20 bp, synthetic construct
  misc_feature 1..20: note = Synthetic construct
  source 1..20: mol_type = other DNA
gggagaagccgaaaccggct

SEQ ID NO: 3489 - DNA, 20 bp, synthetic construct
  misc_feature 1..20: note = Synthetic construct
  source 1..20: mol_type = other DNA
ggagaagccgaaaccggctt

SEQ ID NO: 3490 - DNA, 20 bp, synthetic construct
  misc_feature 1..20: note = Synthetic construct
  source 1..20: mol_type = other DNA
gagaagccgaaaccggcttt

SEQ ID NO: 3491 - DNA, 20 bp, synthetic construct
  misc_feature 1..20: note = Synthetic construct
  source 1..20: mol_type = other DNA
agaagccgaaaccggctttc

SEQ ID NO: 3492 - DNA, 20 bp, synthetic construct
  misc_feature 1..20: note = Synthetic construct
  source 1..20: mol_type = other DNA
gaagccgaaaccggctttct

SEQ ID NO: 3493 - DNA, 20 bp, synthetic construct
  misc_feature 1..20: note = Synthetic construct
  source 1..20: mol_type = other DNA
aagccgaaaccggctttctc

SEQ ID NO: 3494 - DNA, 20 bp, synthetic construct
  misc_feature 1..20: note = Synthetic construct
  source 1..20: mol_type = other DNA
agccgaaaccggctttctcc

SEQ ID NO: 3495 - DNA, 20 bp, synthetic construct
  misc_feature 1..20: note = Synthetic construct
  source 1..20: mol_type = other DNA
gccgaaaccggctttctcct

SEQ ID NO: 3496 - DNA, 20 bp, synthetic construct
  misc_feature 1..20: note = Synthetic construct
  source 1..20: mol_type = other DNA
ccgaaaccggctttctcctc

SEQ ID NO: 3497 - DNA, 20 bp, synthetic construct
  misc_feature 1..20: note = Synthetic construct
  source 1..20: mol_type = other DNA
cgaaaccggctttctcctcg

SEQ ID NO: 3498 - DNA, 20 bp, synthetic construct
  misc_feature 1..20: note = Synthetic construct
  source 1..20: mol_type = other DNA
gaaaccggctttctcctcgt

SEQ ID NO: 3499 - DNA, 20 bp, synthetic construct
  misc_feature 1..20: note = Synthetic construct
  source 1..20: mol_type = other DNA
aaaccggctttctcctcgta

SEQ ID NO: 3500 - DNA, 20 bp, synthetic construct
  misc_feature 1..20: note = Synthetic construct
  source 1..20: mol_type = other DNA
aaccggctttctcctcgtac

SEQ ID NO: 3501 - DNA, 20 bp, synthetic construct
  misc_feature 1..20: note = Synthetic construct
  source 1..20: mol_type = other DNA
accggctttctcctcgtacg

SEQ ID NO: 3502 - DNA, 20 bp, synthetic construct
  misc_feature 1..20: note = Synthetic construct
  source 1..20: mol_type = other DNA
ccggctttctcctcgtacgg

SEQ ID NO: 3503 - DNA, 20 bp, synthetic construct
  misc_feature 1..20: note = Synthetic construct
  source 1..20: mol_type = other DNA
cggctttctcctcgtacggg

SEQ ID NO: 3504 - DNA, 20 bp, synthetic construct
  misc_feature 1..20: note = Synthetic construct
  source 1..20: mol_type = other DNA
ggctttctcctcgtacgggc

SEQ ID NO: 3505 - DNA, 20 bp, synthetic construct
  misc_feature 1..20: note = Synthetic construct
  source 1..20: mol_type = other DNA
gctttctcctcgtacgggcg

SEQ ID NO: 3506 - DNA, 20 bp, synthetic construct
  misc_feature 1..20: note = Synthetic construct
  source 1..20: mol_type = other DNA
ctttctcctcgtacgggcga

SEQ ID NO: 3507 - DNA, 20 bp, synthetic construct
  misc_feature 1..20: note = Synthetic construct
  source 1..20: mol_type = other DNA
tttctcctcgtacgggcgac

SEQ ID NO: 3508 - DNA, 20 bp, synthetic construct
  misc_feature 1..20: note = Synthetic construct
  source 1..20: mol_type = other DNA
ttctcctcgtacgggcgacc

SEQ ID NO: 3509 - DNA, 20 bp, synthetic construct
  misc_feature 1..20: note = Synthetic construct
  source 1..20: mol_type = other DNA
tctcctcgtacgggcgaccc

SEQ ID NO: 3510 - DNA, 20 bp, synthetic construct
  misc_feature 1..20: note = Synthetic construct
  source 1..20: mol_type = other DNA
ctcctcgtacgggcgacccc

SEQ ID NO: 3511 - DNA, 20 bp, synthetic construct
  misc_feature 1..20: note = Synthetic construct
  source 1..20: mol_type = other DNA
tcctcgtacgggcgacccca

SEQ ID NO: 3512 - DNA, 20 bp, synthetic construct
  misc_feature 1..20: note = Synthetic construct
  source 1..20: mol_type = other DNA
cctcgtacgggcgaccccac

SEQ ID NO: 3513 - DNA, 20 bp, synthetic construct
  misc_feature 1..20: note = Synthetic construct
  source 1..20: mol_type = other DNA
ctcgtacgggcgaccccacg

SEQ ID NO: 3514 - DNA, 20 bp, synthetic construct
  misc_feature 1..20: note = Synthetic construct
  source 1..20: mol_type = other DNA
tcgtacgggcgaccccacga

SEQ ID NO: 3515 - DNA, 20 bp, synthetic construct
  misc_feature 1..20: note = Synthetic construct
  source 1..20: mol_type = other DNA
cgtacgggcgaccccacgat

SEQ ID NO: 3516 - DNA, 20 bp, synthetic construct
  misc_feature 1..20: note = Synthetic construct
  source 1..20: mol_type = other DNA
gtacgggcgaccccacgatg

SEQ ID NO: 3517 - DNA, 20 bp, synthetic construct
  misc_feature 1..20: note = Synthetic construct
  source 1..20: mol_type = other DNA
tacgggcgaccccacgatga

SEQ ID NO: 3518 - DNA, 20 bp, synthetic construct
  misc_feature 1..20: note = Synthetic construct
  source 1..20: mol_type = other DNA
acgggcgaccccacgatgac

SEQ ID NO: 3519 - DNA, 20 bp, synthetic construct
  misc_feature 1..20: note = Synthetic construct
  source 1..20: mol_type = other DNA
cgggcgaccccacgatgacc

SEQ ID NO: 3520 - DNA, 20 bp, synthetic construct
  misc_feature 1..20: note = Synthetic construct
  source 1..20: mol_type = other DNA
gggcgaccccacgatgaccc

SEQ ID NO: 3521 - DNA, 20 bp, synthetic construct
  misc_feature 1..20: note = Synthetic construct
  source 1..20: mol_type = other DNA
ggcgaccccacgatgaccca

SEQ ID NO: 3522 - DNA, 20 bp, synthetic construct
  misc_feature 1..20: note = Synthetic construct
  source 1..20: mol_type = other DNA
gcgaccccacgatgacccac

SEQ ID NO: 3523 - DNA, 20 bp, synthetic construct
  misc_feature 1..20: note = Synthetic construct
  source 1..20: mol_type = other DNA
cgaccccacgatgacccact

SEQ ID NO: 3524 - DNA, 20 bp, synthetic construct
  misc_feature 1..20: note = Synthetic construct
  source 1..20: mol_type = other DNA
gaccccacgatgacccactt

SEQ ID NO: 3525 - DNA, 20 bp, synthetic construct
  misc_feature 1..20: note = Synthetic construct
  source 1..20: mol_type = other DNA
accccacgatgacccacttc

SEQ ID NO: 3526 - DNA, 20 bp, synthetic construct
  misc_feature 1..20: note = Synthetic construct
  source 1..20: mol_type = other DNA
ccccacgatgacccacttcg

SEQ ID NO: 3527 - DNA, 20 bp, synthetic construct
  misc_feature 1..20: note = Synthetic construct
  source 1..20: mol_type = other DNA
cccacgatgacccacttcgc

SEQ ID NO: 3528 - DNA, 20 bp, synthetic construct
  misc_feature 1..20: note = Synthetic construct
  source 1..20: mol_type = other DNA
ccacgatgacccacttcgct

SEQ ID NO: 3529 - DNA, 20 bp, synthetic construct
  misc_feature 1..20: note = Synthetic construct
  source 1..20: mol_type = other DNA
cacgatgacccacttcgctt

SEQ ID NO: 3530 - DNA, 20 bp, synthetic construct
  misc_feature 1..20: note = Synthetic construct
  source 1..20: mol_type = other DNA
acgatgacccacttcgcttg

SEQ ID NO: 3531 - DNA, 20 bp, synthetic construct
  misc_feature 1..20: note = Synthetic construct
  source 1..20: mol_type = other DNA
cgatgacccacttcgcttgt

SEQ ID NO: 3532 - DNA, 20 bp, synthetic construct
  misc_feature 1..20: note = Synthetic construct
  source 1..20: mol_type = other DNA
gatgacccacttcgcttgta

SEQ ID NO: 3533 - DNA, 20 bp, synthetic construct
  misc_feature 1..20: note = Synthetic construct
  source 1..20: mol_type = other DNA
atgacccacttcgcttgtag

SEQ ID NO: 3534 - DNA, 20 bp, synthetic construct
  misc_feature 1..20: note = Synthetic construct
  source 1..20: mol_type = other DNA
tgacccacttcgcttgtagg

SEQ ID NO: 3535 - DNA, 20 bp, synthetic construct
  misc_feature 1..20: note = Synthetic construct
  source 1..20: mol_type = other DNA
gacccacttcgcttgtaggc

SEQ ID NO: 3536 - DNA, 20 bp, synthetic construct
  misc_feature 1..20: note = Synthetic construct
  source 1..20: mol_type = other DNA
acccacttcgcttgtaggca

SEQ ID NO: 3537 - DNA, 20 bp, synthetic construct
  misc_feature 1..20: note = Synthetic construct
  source 1..20: mol_type = other DNA
cccacttcgcttgtaggcac

SEQ ID NO: 3538 - DNA, 20 bp, synthetic construct
  misc_feature 1..20: note = Synthetic construct
  source 1..20: mol_type = other DNA
ccacttcgcttgtaggcacc

SEQ ID NO: 3539 - DNA, 20 bp, synthetic construct
  misc_feature 1..20: note = Synthetic construct
  source 1..20: mol_type = other DNA
cacttcgcttgtaggcacct

SEQ ID NO: 3540 - DNA, 20 bp, synthetic construct
  misc_feature 1..20: note = Synthetic construct
  source 1..20: mol_type = other DNA
acttcgcttgtaggcacctt

SEQ ID NO: 3541 - DNA, 20 bp, synthetic construct
  misc_feature 1..20: note = Synthetic construct
  source 1..20: mol_type = other DNA
cttcgcttgtaggcaccttg

SEQ ID NO: 3542 - DNA, 20 bp, synthetic construct
  misc_feature 1..20: note = Synthetic construct
  source 1..20: mol_type = other DNA
ttcgcttgtaggcaccttga

SEQ ID NO: 3543 - DNA, 20 bp, synthetic construct
  misc_feature 1..20: note = Synthetic construct
  source 1..20: mol_type = other DNA
tcgcttgtaggcaccttgat

SEQ ID NO: 3544 - DNA, 20 bp, synthetic construct
  misc_feature 1..20: note = Synthetic construct
  source 1..20: mol_type = other DNA
cgcttgtaggcaccttgatc

SEQ ID NO: 3545 - DNA, 20 bp, synthetic construct
  misc_feature 1..20: note = Synthetic construct
  source 1..20: mol_type = other DNA
gcttgtaggcaccttgatct

SEQ ID NO: 3546 - DNA, 20 bp, synthetic construct
  misc_feature 1..20: note = Synthetic construct
  source 1..20: mol_type = other DNA
cttgtaggcaccttgatcta

SEQ ID NO: 3547 - DNA, 20 bp, synthetic construct
  misc_feature 1..20: note = Synthetic construct
  source 1..20: mol_type = other DNA
ttgtaggcaccttgatctat

SEQ ID NO: 3548 - DNA, 20 bp, synthetic construct
  misc_feature 1..20: note = Synthetic construct
  source 1..20: mol_type = other DNA
tgtaggcaccttgatctatc

SEQ ID NO: 3549 - DNA, 20 bp, synthetic construct
  misc_feature 1..20: note = Synthetic construct
  source 1..20: mol_type = other DNA
gtaggcaccttgatctatcg

SEQ ID NO: 3550 - DNA, 20 bp, synthetic construct
  misc_feature 1..20: note = Synthetic construct
  source 1..20: mol_type = other DNA
taggcaccttgatctatcga

SEQ ID NO: 3551 - DNA, 20 bp, synthetic construct
  misc_feature 1..20: note = Synthetic construct
  source 1..20: mol_type = other DNA
aggcaccttgatctatcgat

SEQ ID NO: 3552 - DNA, 20 bp, synthetic construct
  misc_feature 1..20: note = Synthetic construct
  source 1..20: mol_type = other DNA
ggcaccttgatctatcgatg

SEQ ID NO: 3553 - DNA, 20 bp, synthetic construct
  misc_feature 1..20: note = Synthetic construct
  source 1..20: mol_type = other DNA
gcaccttgatctatcgatgt

SEQ ID NO: 3554 - DNA, 20 bp, synthetic construct
  misc_feature 1..20: note = Synthetic construct
  source 1..20: mol_type = other DNA
caccttgatctatcgatgtg

SEQ ID NO: 3555 - DNA, 20 bp, synthetic construct
  misc_feature 1..20: note = Synthetic construct
  source 1..20: mol_type = other DNA
accttgatctatcgatgtga

SEQ ID NO: 3556 - DNA, 20 bp, synthetic construct
  misc_feature 1..20: note = Synthetic construct
  source 1..20: mol_type = other DNA
ccttgatctatcgatgtgac

SEQ ID NO: 3557 - DNA, 20 bp, synthetic construct
  misc_feature 1..20: note = Synthetic construct
  source 1..20: mol_type = other DNA
cttgatctatcgatgtgaca

SEQ ID NO: 3558 - DNA, 20 bp, synthetic construct
  misc_feature 1..20: note = Synthetic construct
  source 1..20: mol_type = other DNA
ttgatctatcgatgtgacac

SEQ ID NO: 3559 - DNA, 20 bp, synthetic construct
  misc_feature 1..20: note = Synthetic construct
  source 1..20: mol_type = other DNA
tgatctatcgatgtgacact

SEQ ID NO: 3560 - DNA, 20 bp, synthetic construct
  misc_feature 1..20: note = Synthetic construct
  source 1..20: mol_type = other DNA
gatctatcgatgtgacactt

SEQ ID NO: 3561 - DNA, 20 bp, synthetic construct
  misc_feature 1..20: note = Synthetic construct
  source 1..20: mol_type = other DNA
atctatcgatgtgacactta

SEQ ID NO: 3562 - DNA, 20 bp, synthetic construct
  misc_feature 1..20: note = Synthetic construct
  source 1..20: mol_type = other DNA
tctatcgatgtgacacttaa

SEQ ID NO: 3563 - DNA, 20 bp, synthetic construct
  misc_feature 1..20: note = Synthetic construct
  source 1..20: mol_type = other DNA
ctatcgatgtgacacttaac

SEQ ID NO: 3564 - DNA, 20 bp, synthetic construct
  misc_feature 1..20: note = Synthetic construct
  source 1..20: mol_type = other DNA
tatcgatgtgacacttaacg

SEQ ID NO: 3565 - DNA, 20 bp, synthetic construct
  misc_feature 1..20: note = Synthetic construct
  source 1..20: mol_type = other DNA
atcgatgtgacacttaacgc

SEQ ID NO: 3566 - DNA, 20 bp, synthetic construct
  misc_feature 1..20: note = Synthetic construct
  source 1..20: mol_type = other DNA
tcgatgtgacacttaacgcc

SEQ ID NO: 3567 - DNA, 20 bp, synthetic construct
  misc_feature 1..20: note = Synthetic construct
  source 1..20: mol_type = other DNA
cgatgtgacacttaacgccc

SEQ ID NO: 3568 - DNA, 20 bp, synthetic construct
  misc_feature 1..20: note = Synthetic construct
  source 1..20: mol_type = other DNA
gatgtgacacttaacgcccc

SEQ ID NO: 3569 - DNA, 20 bp, synthetic construct
  misc_feature 1..20: note = Synthetic construct
  source 1..20: mol_type = other DNA
atgtgacacttaacgccccc

SEQ ID NO: 3570 - DNA, 20 bp, synthetic construct
  misc_feature 1..20: note = Synthetic construct
  source 1..20: mol_type = other DNA
tgtgacacttaacgcccccc

SEQ ID NO: 3571 - DNA, 20 bp, synthetic construct
  misc_feature 1..20: note = Synthetic construct
  source 1..20: mol_type = other DNA
gtgacacttaacgccccccg

SEQ ID NO: 3572 - DNA, 20 bp, synthetic construct
  misc_feature 1..20: note = Synthetic construct
  source 1..20: mol_type = other DNA
tgacacttaacgccccccgt

SEQ ID NO: 3573 - DNA, 20 bp, synthetic construct
  misc_feature 1..20: note = Synthetic construct
  source 1..20: mol_type = other DNA
gacacttaacgccccccgtg

SEQ ID NO: 3574 - DNA, 20 bp, synthetic construct
  misc_feature 1..20: note = Synthetic construct
  source 1..20: mol_type = other DNA
acacttaacgccccccgtga

SEQ ID NO: 3575 - DNA, 20 bp, synthetic construct
  misc_feature 1..20: note = Synthetic construct
  source 1..20: mol_type = other DNA
cacttaacgccccccgtgaa

SEQ ID NO: 3576 - DNA, 20 bp, synthetic construct
  misc_feature 1..20: note = Synthetic construct
  source 1..20: mol_type = other DNA
acttaacgccccccgtgaat

SEQ ID NO: 3577 - DNA, 20 bp, synthetic construct
  misc_feature 1..20: note = Synthetic construct
  source 1..20: mol_type = other DNA
cttaacgccccccgtgaata

SEQ ID NO: 3578 - DNA, 20 bp, synthetic construct
  misc_feature 1..20: note = Synthetic construct
  source 1..20: mol_type = other DNA
ttaacgccccccgtgaatac

SEQ ID NO: 3579 - DNA, 20 bp, synthetic construct
  misc_feature 1..20: note = Synthetic construct
  source 1..20: mol_type = other DNA
taacgccccccgtgaatacg

SEQ ID NO: 3580 - DNA, 20 bp, synthetic construct
  misc_feature 1..20: note = Synthetic construct
  source 1..20: mol_type = other DNA
aacgccccccgtgaatacgg

SEQ ID NO: 3581 - DNA, 20 bp, synthetic construct
  misc_feature 1..20: note = Synthetic construct
  source 1..20: mol_type = other DNA
acgccccccgtgaatacgga

SEQ ID NO: 3582 - DNA, 20 bp, synthetic construct
  misc_feature 1..20: note = Synthetic construct
  source 1..20: mol_type = other DNA
cgccccccgtgaatacggag

SEQ ID NO: 3583 - DNA, 20 bp, synthetic construct
  misc_feature 1..20: note = Synthetic construct
  source 1..20: mol_type = other DNA
gccccccgtgaatacggaga

SEQ ID NO: 3584 - DNA, 20 bp, synthetic construct
  misc_feature 1..20: note = Synthetic construct
  source 1..20: mol_type = other DNA
ccccccgtgaatacggagag

SEQ ID NO: 3585 - DNA, 20 bp, synthetic construct
  misc_feature 1..20: note = Synthetic construct
  source 1..20: mol_type = other DNA
cccccgtgaatacggagagg

SEQ ID NO: 3586 - DNA, 20 bp, synthetic construct
  misc_feature 1..20: note = Synthetic construct
  source 1..20: mol_type = other DNA
ccccgtgaatacggagaggg

SEQ ID NO: 3587 - DNA, 20 bp, synthetic construct
  misc_feature 1..20: note = Synthetic construct
  source 1..20: mol_type = other DNA
cccgtgaatacggagagggg

SEQ ID NO: 3588 - DNA, 20 bp, synthetic construct
  misc_feature 1..20: note = Synthetic construct
  source 1..20: mol_type = other DNA
ccgtgaatacggagaggggt

SEQ ID NO: 3589 - DNA, 20 bp, synthetic construct
  misc_feature 1..20: note = Synthetic construct
  source 1..20: mol_type = other DNA
cgtgaatacggagaggggta

SEQ ID NO: 3590 - DNA, 20 bp, synthetic construct
  misc_feature 1..20: note = Synthetic construct
  source 1..20: mol_type = other DNA
gtgaatacggagaggggtag

SEQ ID NO: 3591 - DNA, 20 bp, synthetic construct
  misc_feature 1..20: note = Synthetic construct
  source 1..20: mol_type = other DNA
tgaatacggagaggggtagt

SEQ ID NO: 3592 - DNA, 20 bp, synthetic construct
  misc_feature 1..20: note = Synthetic construct
  source 1..20: mol_type = other DNA
gaatacggagaggggtagtg

SEQ ID NO: 3593 - DNA, 20 bp, synthetic construct
  misc_feature 1..20: note = Synthetic construct
  source 1..20: mol_type = other DNA
aatacggagaggggtagtgc

SEQ ID NO: 3594 - DNA, 20 bp, synthetic construct
  misc_feature 1..20: note = Synthetic construct
  source 1..20: mol_type = other DNA
atacggagaggggtagtgcc

SEQ ID NO: 3595 - DNA, 20 bp, synthetic construct
  misc_feature 1..20: note = Synthetic construct
  source 1..20: mol_type = other DNA
tacggagaggggtagtgcca

SEQ ID NO: 3596 - DNA, 20 bp, synthetic construct
  misc_feature 1..20: note = Synthetic construct
  source 1..20: mol_type = other DNA
acggagaggggtagtgccac

SEQ ID NO: 3597 - DNA, 20 bp, synthetic construct
  misc_feature 1..20: note = Synthetic construct
  source 1..20: mol_type = other DNA
cggagaggggtagtgccact

SEQ ID NO: 3598 - DNA, 20 bp, synthetic construct
  misc_feature 1..20: note = Synthetic construct
  source 1..20: mol_type = other DNA
ggagaggggtagtgccactg

SEQ ID NO: 3599 - DNA, 20 bp, synthetic construct
  misc_feature 1..20: note = Synthetic construct
  source 1..20: mol_type = other DNA
gagaggggtagtgccactgt

SEQ ID NO: 3600 - DNA, 20 bp, synthetic construct
  misc_feature 1..20: note = Synthetic construct
  source 1..20: mol_type = other DNA
agaggggtagtgccactgtt

SEQ ID NO: 3601 - DNA, 20 bp, synthetic construct
  misc_feature 1..20: note = Synthetic construct
  source 1..20: mol_type = other DNA
gaggggtagtgccactgttt

SEQ ID NO: 3602 - DNA, 20 bp, synthetic construct
  misc_feature 1..20: note = Synthetic construct
  source 1..20: mol_type = other DNA
aggggtagtgccactgtttc

SEQ ID NO: 3603 - DNA, 20 bp, synthetic construct
  misc_feature 1..20: note = Synthetic construct
  source 1..20: mol_type = other DNA
ggggtagtgccactgtttcg

SEQ ID NO: 3604 - DNA, 20 bp, synthetic construct
  misc_feature 1..20: note = Synthetic construct
  source 1..20: mol_type = other DNA
gggtagtgccactgtttcgt

SEQ ID NO: 3605 - DNA, 20 bp, synthetic construct
  misc_feature 1..20: note = Synthetic construct
  source 1..20: mol_type = other DNA
ggtagtgccactgtttcgtt

SEQ ID NO: 3606 - DNA, 20 bp, synthetic construct
  misc_feature 1..20: note = Synthetic construct
  source 1..20: mol_type = other DNA
gtagtgccactgtttcgttt

SEQ ID NO: 3607 - DNA, 20 bp, synthetic construct
  misc_feature 1..20: note = Synthetic construct
  source 1..20: mol_type = other DNA
tagtgccactgtttcgtttt

SEQ ID NO: 3608 - DNA, 20 bp, synthetic construct
  misc_feature 1..20: note = Synthetic construct
  source 1..20: mol_type = other DNA
agtgccactgtttcgttttg

SEQ ID NO: 3609 - DNA, 20 bp, synthetic construct
  misc_feature 1..20: note = Synthetic construct
  source 1..20: mol_type = other DNA
gtgccactgtttcgttttgg

SEQ ID NO: 3610 - DNA, 20 bp, synthetic construct
  misc_feature 1..20: note = Synthetic construct
  source 1..20: mol_type = other DNA
tgccactgtttcgttttggc

SEQ ID NO: 3611 - DNA, 20 bp, synthetic construct
  misc_feature 1..20: note = Synthetic construct
  source 1..20: mol_type = other DNA
gccactgtttcgttttggcc

SEQ ID NO: 3612 - DNA, 20 bp, synthetic construct
  misc_feature 1..20: note = Synthetic construct
  source 1..20: mol_type = other DNA
ccactgtttcgttttggccc

SEQ ID NO: 3613 - DNA, 20 bp, synthetic construct
  misc_feature 1..20: note = Synthetic construct
  source 1..20: mol_type = other DNA
cactgtttcgttttggcccc

SEQ ID NO: 3614 - DNA, 20 bp, synthetic construct
  misc_feature 1..20: note = Synthetic construct
  source 1..20: mol_type = other DNA
actgtttcgttttggcccca

SEQ ID NO: 3615 - DNA, 20 bp, synthetic construct
  misc_feature 1..20: note = Synthetic construct
  source 1..20: mol_type = other DNA
ctgtttcgttttggccccag

SEQ ID NO: 3616 - DNA, 20 bp, synthetic construct
  misc_feature 1..20: note = Synthetic construct
  source 1..20: mol_type = other DNA
tgtttcgttttggccccagt

SEQ ID NO: 3617 - DNA, 20 bp, synthetic construct
  misc_feature 1..20: note = Synthetic construct
  source 1..20: mol_type = other DNA
gtttcgttttggccccagtc

SEQ ID NO: 3618 - DNA, 20 bp, synthetic construct
  misc_feature 1..20: note = Synthetic construct
  source 1..20: mol_type = other DNA
tttcgttttggccccagtcg

SEQ ID NO: 3619 - DNA, 20 bp, synthetic construct
  misc_feature 1..20: note = Synthetic construct
  source 1..20: mol_type = other DNA
ttcgttttggccccagtcga

SEQ ID NO: 3620 - DNA, 20 bp, synthetic construct
  misc_feature 1..20: note = Synthetic construct
  source 1..20: mol_type = other DNA
tcgttttggccccagtcgag

SEQ ID NO: 3621 - DNA, 20 bp, synthetic construct
  misc_feature 1..20: note = Synthetic construct
  source 1..20: mol_type = other DNA
cgttttggccccagtcgagt

SEQ ID NO: 3622 - DNA, 20 bp, synthetic construct
  misc_feature 1..20: note = Synthetic construct
  source 1..20: mol_type = other DNA
gttttggccccagtcgagtt

SEQ ID NO: 3623 - DNA, 20 bp, synthetic construct
  misc_feature 1..20: note = Synthetic construct
  source 1..20: mol_type = other DNA
ttttggccccagtcgagtta

SEQ ID NO: 3624 - DNA, 20 bp, synthetic construct
  misc_feature 1..20: note = Synthetic construct
  source 1..20: mol_type = other DNA
tttggccccagtcgagttaa

SEQ ID NO: 3625 - DNA, 20 bp, synthetic construct
  misc_feature 1..20: note = Synthetic construct
  source 1..20: mol_type = other DNA
ttggccccagtcgagttaaa

SEQ ID NO: 3626 - DNA, 20 bp, synthetic construct
  misc_feature 1..20: note = Synthetic construct
  source 1..20: mol_type = other DNA
tggccccagtcgagttaaaa

SEQ ID NO: 3627 - DNA, 20 bp, synthetic construct
  misc_feature 1..20: note = Synthetic construct
  source 1..20: mol_type = other DNA
ggccccagtcgagttaaaac

SEQ ID NO: 3628 - DNA, 20 bp, synthetic construct
  misc_feature 1..20: note = Synthetic construct
  source 1..20: mol_type = other DNA
gccccagtcgagttaaaacg

SEQ ID NO: 3629 - DNA, 20 bp, synthetic construct
  misc_feature 1..20: note = Synthetic construct
  source 1..20: mol_type = other DNA
ccccagtcgagttaaaacga

SEQ ID NO: 3630 - DNA, 20 bp, synthetic construct
  misc_feature 1..20: note = Synthetic construct
  source 1..20: mol_type = other DNA
cccagtcgagttaaaacgac

SEQ ID NO: 3631 - DNA, 20 bp, synthetic construct
  misc_feature 1..20: note = Synthetic construct
  source 1..20: mol_type = other DNA
ccagtcgagttaaaacgacc

SEQ ID NO: 3632 - DNA, 20 bp, synthetic construct
  misc_feature 1..20: note = Synthetic construct
  source 1..20: mol_type = other DNA
cagtcgagttaaaacgaccg

SEQ ID NO: 3633 - DNA, 20 bp, synthetic construct
  misc_feature 1..20: note = Synthetic construct
  source 1..20: mol_type = other DNA
agtcgagttaaaacgaccgg

SEQ ID NO: 3634 - DNA, 20 bp, synthetic construct
  misc_feature 1..20: note = Synthetic construct
  source 1..20: mol_type = other DNA
gtcgagttaaaacgaccggg

SEQ ID NO: 3635 - DNA, 20 bp, synthetic construct
  misc_feature 1..20: note = Synthetic construct
  source 1..20: mol_type = other DNA
tcgagttaaaacgaccggga

SEQ ID NO: 3636 - DNA, 20 bp, synthetic construct
  misc_feature 1..20: note = Synthetic construct
  source 1..20: mol_type = other DNA
cgagttaaaacgaccgggag

SEQ ID NO: 3637 - DNA, 20 bp, synthetic construct
  misc_feature 1..20: note = Synthetic construct
  source 1..20: mol_type = other DNA
gagttaaaacgaccgggagt

SEQ ID NO: 3638 - DNA, 20 bp, synthetic construct
  misc_feature 1..20: note = Synthetic construct
  source 1..20: mol_type = other DNA
agttaaaacgaccgggagtc

SEQ ID NO: 3639 - DNA, 20 bp, synthetic construct
  misc_feature 1..20: note = Synthetic construct
  source 1..20: mol_type = other DNA
gttaaaacgaccgggagtcc

SEQ ID NO: 3640 - DNA, 20 bp, synthetic construct
  misc_feature 1..20: note = Synthetic construct
  source 1..20: mol_type = other DNA
ttaaaacgaccgggagtcca

SEQ ID NO: 3641 - DNA, 20 bp, synthetic construct
  misc_feature 1..20: note = Synthetic construct
  source 1..20: mol_type = other DNA
taaaacgaccgggagtccag

SEQ ID NO: 3642 - DNA, 20 bp, synthetic construct
  misc_feature 1..20: note = Synthetic construct
  source 1..20: mol_type = other DNA
aaaacgaccgggagtccagt

SEQ ID NO: 3643 - DNA, 20 bp, synthetic construct
  misc_feature 1..20: note = Synthetic construct
  source 1..20: mol_type = other DNA
aaacgaccgggagtccagtt

SEQ ID NO: 3644 - DNA, 20 bp, synthetic construct
  misc_feature 1..20: note = Synthetic construct
  source 1..20: mol_type = other DNA
aacgaccgggagtccagttc

SEQ ID NO: 3645 - DNA, 20 bp, synthetic construct
  misc_feature 1..20: note = Synthetic construct
  source 1..20: mol_type = other DNA
acgaccgggagtccagttcg

SEQ ID NO: 3646 - DNA, 20 bp, synthetic construct
  misc_feature 1..20: note = Synthetic construct
  source 1..20: mol_type = other DNA
cgaccgggagtccagttcga

SEQ ID NO: 3647 - DNA, 20 bp, synthetic construct
  misc_feature 1..20: note = Synthetic construct
  source 1..20: mol_type = other DNA
gaccgggagtccagttcgaa

SEQ ID NO: 3648 - DNA, 20 bp, synthetic construct
  misc_feature 1..20: note = Synthetic construct
  source 1..20: mol_type = other DNA
accgggagtccagttcgaac

SEQ ID NO: 3649 - DNA, 20 bp, synthetic construct
  misc_feature 1..20: note = Synthetic construct
  source 1..20: mol_type = other DNA
ccgggagtccagttcgaacg

SEQ ID NO: 3650 - DNA, 20 bp, synthetic construct
  misc_feature 1..20: note = Synthetic construct
  source 1..20: mol_type = other DNA
cgggagtccagttcgaacga

SEQ ID NO: 3651 - DNA, 20 bp, synthetic construct
  misc_feature 1..20: note = Synthetic construct
  source 1..20: mol_type = other DNA
gggagtccagttcgaacgat

SEQ ID NO: 3652 - DNA, 20 bp, synthetic construct
  misc_feature 1..20: note = Synthetic construct
  source 1..20: mol_type = other DNA
ggagtccagttcgaacgata

SEQ ID NO: 3653 - DNA, 20 bp, synthetic construct
  misc_feature 1..20: note = Synthetic construct
  source 1..20: mol_type = other DNA
gagtccagttcgaacgatat

SEQ ID NO: 3654 - DNA, 20 bp, synthetic construct
  misc_feature 1..20: note = Synthetic construct
  source 1..20: mol_type = other DNA
agtccagttcgaacgatatt

SEQ ID NO: 3655 - DNA, 20 bp, synthetic construct
  misc_feature 1..20: note = Synthetic construct
  source 1..20: mol_type = other DNA
gtccagttcgaacgatattt

SEQ ID NO: 3656 - DNA, 20 bp, synthetic construct
  misc_feature 1..20: note = Synthetic construct
  source 1..20: mol_type = other DNA
tccagttcgaacgatatttt

SEQ ID NO: 3657 - DNA, 20 bp, synthetic construct
  misc_feature 1..20: note = Synthetic construct
  source 1..20: mol_type = other DNA
ccagttcgaacgatatttta

SEQ ID NO: 3658 - DNA, 20 bp, synthetic construct
  misc_feature 1..20: note = Synthetic construct
  source 1..20: mol_type = other DNA
cagttcgaacgatattttaa

SEQ ID NO: 3659 - DNA, 20 bp, synthetic construct
  misc_feature 1..20: note = Synthetic construct
  source 1..20: mol_type = other DNA
agttcgaacgatattttaaa

SEQ ID NO: 3660 - DNA, 20 bp, synthetic construct
  misc_feature 1..20: note = Synthetic construct
  source 1..20: mol_type = other DNA
gttcgaacgatattttaaag

SEQ ID NO: 3661 - DNA, 20 bp, synthetic construct
  misc_feature 1..20: note = Synthetic construct
  source 1..20: mol_type = other DNA
ttcgaacgatattttaaaga

SEQ ID NO: 3662 - DNA, 20 bp, synthetic construct
  misc_feature 1..20: note = Synthetic construct
  source 1..20: mol_type = other DNA
tcgaacgatattttaaagag

SEQ ID NO: 3663 - DNA, 20 bp, synthetic construct
  misc_feature 1..20: note = Synthetic construct
  source 1..20: mol_type = other DNA
cgaacgatattttaaagaga

SEQ ID NO: 3664 - DNA, 20 bp, synthetic construct
  misc_feature 1..20: note = Synthetic construct
  source 1..20: mol_type = other DNA
gaacgatattttaaagagaa

SEQ ID NO: 3665 - DNA, 20 bp, synthetic construct
  misc_feature 1..20: note = Synthetic construct
  source 1..20: mol_type = other DNA
aacgatattttaaagagaat

SEQ ID NO: 3666 - DNA, 20 bp, synthetic construct
  misc_feature 1..20: note = Synthetic construct
  source 1..20: mol_type = other DNA
acgatattttaaagagaatg

SEQ ID NO: 3667 - DNA, 20 bp, synthetic construct
  misc_feature 1..20: note = Synthetic construct
  source 1..20: mol_type = other DNA
cgatattttaaagagaatga

SEQ ID NO: 3668 - DNA, 20 bp, synthetic construct
  misc_feature 1..20: note = Synthetic construct
  source 1..20: mol_type = other DNA
gatattttaaagagaatgag

SEQ ID NO: 3669 - DNA, 20 bp, synthetic construct
  misc_feature 1..20: note = Synthetic construct
  source 1..20: mol_type = other DNA
atattttaaagagaatgagt

SEQ ID NO: 3670 - DNA, 20 bp, synthetic construct
  misc_feature 1..20: note = Synthetic construct
  source 1..20: mol_type = other DNA
tattttaaagagaatgagtt

SEQ ID NO: 3671 - DNA, 20 bp, synthetic construct
  misc_feature 1..20: note = Synthetic construct
  source 1..20: mol_type = other DNA
attttaaagagaatgagtta

SEQ ID NO: 3672 - DNA, 20 bp, synthetic construct
  misc_feature 1..20: note = Synthetic construct
  source 1..20: mol_type = other DNA
ttttaaagagaatgagttat

SEQ ID NO: 3673 - DNA, 20 bp, synthetic construct
  misc_feature 1..20: note = Synthetic construct
  source 1..20: mol_type = other DNA
tttaaagagaatgagttatc

SEQ ID NO: 3674 - DNA, 20 bp, synthetic construct
  misc_feature 1..20: note = Synthetic construct
  source 1..20: mol_type = other DNA
ttaaagagaatgagttatct

SEQ ID NO: 3675 - DNA, 20 bp, synthetic construct
  misc_feature 1..20: note = Synthetic construct
  source 1..20: mol_type = other DNA
taaagagaatgagttatctt

SEQ ID NO: 3676 - DNA, 20 bp, synthetic construct
  misc_feature 1..20: note = Synthetic construct
  source 1..20: mol_type = other DNA
aaagagaatgagttatcttc

SEQ ID NO: 3677 - DNA, 20 bp, synthetic construct
  misc_feature 1..20: note = Synthetic construct
  source 1..20: mol_type = other DNA
aagagaatgagttatcttca

SEQ ID NO: 3678 - DNA, 20 bp, synthetic construct
  misc_feature 1..20: note = Synthetic construct
  source 1..20: mol_type = other DNA
agagaatgagttatcttcag

SEQ ID NO: 3679 - DNA, 20 bp, synthetic construct
  misc_feature 1..20: note = Synthetic construct
  source 1..20: mol_type = other DNA
gagaatgagttatcttcagt

SEQ ID NO: 3680 - DNA, 20 bp, synthetic construct
  misc_feature 1..20: note = Synthetic construct
  source 1..20: mol_type = other DNA
agaatgagttatcttcagtc

SEQ ID NO: 3681 - DNA, 20 bp, synthetic construct
  misc_feature 1..20: note = Synthetic construct
  source 1..20: mol_type = other DNA
gaatgagttatcttcagtct

SEQ ID NO: 3682 - DNA, 20 bp, synthetic construct
  misc_feature 1..20: note = Synthetic construct
  source 1..20: mol_type = other DNA
aatgagttatcttcagtctc

SEQ ID NO: 3683 - DNA, 20 bp, synthetic construct
  misc_feature 1..20: note = Synthetic construct
  source 1..20: mol_type = other DNA
atgagttatcttcagtctca

SEQ ID NO: 3684 - DNA, 20 bp, synthetic construct
  misc_feature 1..20: note = Synthetic construct
  source 1..20: mol_type = other DNA
tgagttatcttcagtctcac

SEQ ID NO: 3685 - DNA, 20 bp, synthetic construct
  misc_feature 1..20: note = Synthetic construct
  source 1..20: mol_type = other DNA
gagttatcttcagtctcacc

SEQ ID NO: 3686 - DNA, 20 bp, synthetic construct
  misc_feature 1..20: note = Synthetic construct
  source 1..20: mol_type = other DNA
agttatcttcagtctcaccg

SEQ ID NO: 3687 - DNA, 20 bp, synthetic construct
  misc_feature 1..20: note = Synthetic construct
  source 1..20: mol_type = other DNA
gttatcttcagtctcaccgt

SEQ ID NO: 3688 - DNA, 20 bp, synthetic construct
  misc_feature 1..20: note = Synthetic construct
  source 1..20: mol_type = other DNA
ttatcttcagtctcaccgtc

SEQ ID NO: 3689 - DNA, 20 bp, synthetic construct
  misc_feature 1..20: note = Synthetic construct
  source 1..20: mol_type = other DNA
tatcttcagtctcaccgtcc

SEQ ID NO: 3690 - DNA, 20 bp, synthetic construct
  misc_feature 1..20: note = Synthetic construct
  source 1..20: mol_type = other DNA
atcttcagtctcaccgtccg

SEQ ID NO: 3691 - DNA, 20 bp, synthetic construct
  misc_feature 1..20: note = Synthetic construct
  source 1..20: mol_type = other DNA
tcttcagtctcaccgtccgc

SEQ ID NO: 3692 - DNA, 20 bp, synthetic construct
  misc_feature 1..20: note = Synthetic construct
  source 1..20: mol_type = other DNA
cttcagtctcaccgtccgcg

SEQ ID NO: 3693 - DNA, 20 bp, synthetic construct
  misc_feature 1..20: note = Synthetic construct
  source 1..20: mol_type = other DNA
ttcagtctcaccgtccgcgt

SEQ ID NO: 3694 - DNA, 20 bp, synthetic construct
  misc_feature 1..20: note = Synthetic construct
  source 1..20: mol_type = other DNA
tcagtctcaccgtccgcgta

SEQ ID NO: 3695 - DNA, 20 bp, synthetic construct
  misc_feature 1..20: note = Synthetic construct
  source 1..20: mol_type = other DNA
cagtctcaccgtccgcgtaa

SEQ ID NO: 3696 - DNA, 20 bp, synthetic construct
  misc_feature 1..20: note = Synthetic construct
  source 1..20: mol_type = other DNA
agtctcaccgtccgcgtaaa

SEQ ID NO: 3697 - DNA, 20 bp, synthetic construct
  misc_feature 1..20: note = Synthetic construct
  source 1..20: mol_type = other DNA
gtctcaccgtccgcgtaaac

SEQ ID NO: 3698 - DNA, 20 bp, synthetic construct
  misc_feature 1..20: note = Synthetic construct
  source 1..20: mol_type = other DNA
tctcaccgtccgcgtaaacg

SEQ ID NO: 3699 - DNA, 20 bp, synthetic construct
  misc_feature 1..20: note = Synthetic construct
  source 1..20: mol_type = other DNA
ctcaccgtccgcgtaaacgc

SEQ ID NO: 3700 - DNA, 20 bp, synthetic construct
  misc_feature 1..20: note = Synthetic construct
  source 1..20: mol_type = other DNA
tcaccgtccgcgtaaacgcg

SEQ ID NO: 3701 - DNA, 20 bp, synthetic construct
  misc_feature 1..20: note = Synthetic construct
  source 1..20: mol_type = other DNA
caccgtccgcgtaaacgcga

SEQ ID NO: 3702 - DNA, 20 bp, synthetic construct
  misc_feature 1..20: note = Synthetic construct
  source 1..20: mol_type = other DNA
accgtccgcgtaaacgcgaa

SEQ ID NO: 3703 - DNA, 20 bp, synthetic construct
  misc_feature 1..20: note = Synthetic construct
  source 1..20: mol_type = other DNA
ccgtccgcgtaaacgcgaac

SEQ ID NO: 3704 - DNA, 20 bp, synthetic construct
  misc_feature 1..20: note = Synthetic construct
  source 1..20: mol_type = other DNA
cgtccgcgtaaacgcgaacg

SEQ ID NO: 3705 - DNA, 20 bp, synthetic construct
  misc_feature 1..20: note = Synthetic construct
  source 1..20: mol_type = other DNA
gtccgcgtaaacgcgaacgg

SEQ ID NO: 3706 - DNA, 20 bp, synthetic construct
  misc_feature 1..20: note = Synthetic construct
  source 1..20: mol_type = other DNA
tccgcgtaaacgcgaacgga

SEQ ID NO: 3707 - DNA, 20 bp, synthetic construct
  misc_feature 1..20: note = Synthetic construct
  source 1..20: mol_type = other DNA
ccgcgtaaacgcgaacggag

SEQ ID NO: 3708 - DNA, 20 bp, synthetic construct
  misc_feature 1..20: note = Synthetic construct
  source 1..20: mol_type = other DNA
cgcgtaaacgcgaacggagg

SEQ ID NO: 3709 - DNA, 20 bp, synthetic construct
  misc_feature 1..20: note = Synthetic construct
  source 1..20: mol_type = other DNA
gcgtaaacgcgaacggaggg

SEQ ID NO: 3710 - DNA, 20 bp, synthetic construct
  misc_feature 1..20: note = Synthetic construct
  source 1..20: mol_type = other DNA
cgtaaacgcgaacggagggg

SEQ ID NO: 3711 - DNA, 20 bp, synthetic construct
  misc_feature 1..20: note = Synthetic construct
  source 1..20: mol_type = other DNA
gtaaacgcgaacggagggga

SEQ ID NO: 3712 - DNA, 20 bp, synthetic construct
  misc_feature 1..20: note = Synthetic construct
  source 1..20: mol_type = other DNA
taaacgcgaacggaggggac

SEQ ID NO: 3713 - DNA, 20 bp, synthetic construct
  misc_feature 1..20: note = Synthetic construct
  source 1..20: mol_type = other DNA
aaacgcgaacggaggggacg

SEQ ID NO: 3714 - DNA, 20 bp, synthetic construct
  misc_feature 1..20: note = Synthetic construct
  source 1..20: mol_type = other DNA
aacgcgaacggaggggacga

SEQ ID NO: 3715 - DNA, 20 bp, synthetic construct
  misc_feature 1..20: note = Synthetic construct
  source 1..20: mol_type = other DNA
acgcgaacggaggggacgaa

SEQ ID NO: 3716 - DNA, 20 bp, synthetic construct
  misc_feature 1..20: note = Synthetic construct
  source 1..20: mol_type = other DNA
cgcgaacggaggggacgaag

SEQ ID NO: 3717 - DNA, 20 bp, synthetic construct
  misc_feature 1..20: note = Synthetic construct
  source 1..20: mol_type = other DNA
gcgaacggaggggacgaagg

SEQ ID NO: 3718 - DNA, 20 bp, synthetic construct
  misc_feature 1..20: note = Synthetic construct
  source 1..20: mol_type = other DNA
cgaacggaggggacgaaggt

SEQ ID NO: 3719 - DNA, 20 bp, synthetic construct
  misc_feature 1..20: note = Synthetic construct
  source 1..20: mol_type = other DNA
gaacggaggggacgaaggtc

SEQ ID NO: 3720 - DNA, 20 bp, synthetic construct
  misc_feature 1..20: note = Synthetic construct
  source 1..20: mol_type = other DNA
aacggaggggacgaaggtct

SEQ ID NO: 3721 - DNA, 20 bp, synthetic construct
  misc_feature 1..20: note = Synthetic construct
  source 1..20: mol_type = other DNA
acggaggggacgaaggtctc

SEQ ID NO: 3722 - DNA, 20 bp, synthetic construct
  misc_feature 1..20: note = Synthetic construct
  source 1..20: mol_type = other DNA
cggaggggacgaaggtctcg

SEQ ID NO: 3723 - DNA, 20 bp, synthetic construct
  misc_feature 1..20: note = Synthetic construct
  source 1..20: mol_type = other DNA
ggaggggacgaaggtctcgt

SEQ ID NO: 3724 - DNA, 20 bp, synthetic construct
  misc_feature 1..20: note = Synthetic construct
  source 1..20: mol_type = other DNA
gaggggacgaaggtctcgtt

SEQ ID NO: 3725 - DNA, 20 bp, synthetic construct
  misc_feature 1..20: note = Synthetic construct
  source 1..20: mol_type = other DNA
aggggacgaaggtctcgttc

SEQ ID NO: 3726 - DNA, 20 bp, synthetic construct
  misc_feature 1..20: note = Synthetic construct
  source 1..20: mol_type = other DNA
ggggacgaaggtctcgttct

SEQ ID NO: 3727 - DNA, 20 bp, synthetic construct
  misc_feature 1..20: note = Synthetic construct
  source 1..20: mol_type = other DNA
gggacgaaggtctcgttctc

SEQ ID NO: 3728 - DNA, 20 bp, synthetic construct
  misc_feature 1..20: note = Synthetic construct
  source 1..20: mol_type = other DNA
ggacgaaggtctcgttctcc

SEQ ID NO: 3729 - DNA, 20 bp, synthetic construct
  misc_feature 1..20: note = Synthetic construct
  source 1..20: mol_type = other DNA
gacgaaggtctcgttctccc

SEQ ID NO: 3730 - DNA, 20 bp, synthetic construct
  misc_feature 1..20: note = Synthetic construct
  source 1..20: mol_type = other DNA
acgaaggtctcgttctccct

SEQ ID NO: 3731 - DNA, 20 bp, synthetic construct
  misc_feature 1..20: note = Synthetic construct
  source 1..20: mol_type = other DNA
cgaaggtctcgttctcccta

SEQ ID NO: 3732 - DNA, 20 bp, synthetic construct
  misc_feature 1..20: note = Synthetic construct
  source 1..20: mol_type = other DNA
gaaggtctcgttctccctat

SEQ ID NO: 3733 - DNA, 20 bp, synthetic construct
  misc_feature 1..20: note = Synthetic construct
  source 1..20: mol_type = other DNA
aaggtctcgttctccctatc

SEQ ID NO: 3734 - DNA, 20 bp, synthetic construct
  misc_feature 1..20: note = Synthetic construct
  source 1..20: mol_type = other DNA
aggtctcgttctccctatca

SEQ ID NO: 3735 - DNA, 20 bp, synthetic construct
  misc_feature 1..20: note = Synthetic construct
  source 1..20: mol_type = other DNA
ggtctcgttctccctatcaa

SEQ ID NO: 3736 - DNA, 20 bp, synthetic construct
  misc_feature 1..20: note = Synthetic construct
  source 1..20: mol_type = other DNA
gtctcgttctccctatcaag

SEQ ID NO: 3737 - DNA, 20 bp, synthetic construct
  misc_feature 1..20: note = Synthetic construct
  source 1..20: mol_type = other DNA
tctcgttctccctatcaagg

SEQ ID NO: 3738 - DNA, 20 bp, synthetic construct
  misc_feature 1..20: note = Synthetic construct
  source 1..20: mol_type = other DNA
ctcgttctccctatcaaggg

SEQ ID NO: 3739 - DNA, 20 bp, synthetic construct
  misc_feature 1..20: note = Synthetic construct
  source 1..20: mol_type = other DNA
tcgttctccctatcaagggt

SEQ ID NO: 3740 - DNA, 20 bp, synthetic construct
  misc_feature 1..20: note = Synthetic construct
  source 1..20: mol_type = other DNA
cgttctccctatcaagggta

SEQ ID NO: 3741 - DNA, 20 bp, synthetic construct
  misc_feature 1..20: note = Synthetic construct
  source 1..20: mol_type = other DNA
gttctccctatcaagggtac

SEQ ID NO: 3742 - DNA, 20 bp, synthetic construct
  misc_feature 1..20: note = Synthetic construct
  source 1..20: mol_type = other DNA
ttctccctatcaagggtact

SEQ ID NO: 3743 - DNA, 20 bp, synthetic construct
  misc_feature 1..20: note = Synthetic construct
  source 1..20: mol_type = other DNA
tctccctatcaagggtacta

SEQ ID NO: 3744 - DNA, 20 bp, synthetic construct
  misc_feature 1..20: note = Synthetic construct
  source 1..20: mol_type = other DNA
ctccctatcaagggtactaa

SEQ ID NO: 3745 - DNA, 20 bp, synthetic construct
  misc_feature 1..20: note = Synthetic construct
  source 1..20: mol_type = other DNA
tccctatcaagggtactaaa

SEQ ID NO: 3746 - DNA, 20 bp, synthetic construct
  misc_feature 1..20: note = Synthetic construct
  source 1..20: mol_type = other DNA
ccctatcaagggtactaaaa

SEQ ID NO: 3747 - DNA, 20 bp, synthetic construct
  misc_feature 1..20: note = Synthetic construct
  source 1..20: mol_type = other DNA
cctatcaagggtactaaaag

SEQ ID NO: 3748 - DNA, 20 bp, synthetic construct
  misc_feature 1..20: note = Synthetic construct
  source 1..20: mol_type = other DNA
ctatcaagggtactaaaagc

SEQ ID NO: 3749 - DNA, 20 bp, synthetic construct
  misc_feature 1..20: note = Synthetic construct
  source 1..20: mol_type = other DNA
tatcaagggtactaaaagct

SEQ ID NO: 3750 - DNA, 20 bp, synthetic construct
  misc_feature 1..20: note = Synthetic construct
  source 1..20: mol_type = other DNA
atcaagggtactaaaagctc

SEQ ID NO: 3751 - DNA, 20 bp, synthetic construct
  misc_feature 1..20: note = Synthetic construct
  source 1..20: mol_type = other DNA
tcaagggtactaaaagctcg

SEQ ID NO: 3752 - DNA, 20 bp, synthetic construct
  misc_feature 1..20: note = Synthetic construct
  source 1..20: mol_type = other DNA
caagggtactaaaagctcgc

SEQ ID NO: 3753 - DNA, 20 bp, synthetic construct
  misc_feature 1..20: note = Synthetic construct
  source 1..20: mol_type = other DNA
aagggtactaaaagctcgca

SEQ ID NO: 3754 - DNA, 20 bp, synthetic construct
  misc_feature 1..20: note = Synthetic construct
  source 1..20: mol_type = other DNA
agggtactaaaagctcgcac

SEQ ID NO: 3755 - DNA, 20 bp, synthetic construct
  misc_feature 1..20: note = Synthetic construct
  source 1..20: mol_type = other DNA
gggtactaaaagctcgcaca

SEQ ID NO: 3756 - DNA, 20 bp, synthetic construct
  misc_feature 1..20: note = Synthetic construct
  source 1..20: mol_type = other DNA
ggtactaaaagctcgcacag

SEQ ID NO: 3757 - DNA, 20 bp, synthetic construct
  misc_feature 1..20: note = Synthetic construct
  source 1..20: mol_type = other DNA
gtactaaaagctcgcacagg

SEQ ID NO: 3758 - DNA, 20 bp, synthetic construct
  misc_feature 1..20: note = Synthetic construct
  source 1..20: mol_type = other DNA
tactaaaagctcgcacaggt

SEQ ID NO: 3759 - DNA, 20 bp, synthetic construct
  misc_feature 1..20: note = Synthetic construct
  source 1..20: mol_type = other DNA
actaaaagctcgcacaggtc

SEQ ID NO: 3760 - DNA, 20 bp, synthetic construct
  misc_feature 1..20: note = Synthetic construct
  source 1..20: mol_type = other DNA
ctaaaagctcgcacaggtca

SEQ ID NO: 3761 - DNA, 20 bp, synthetic construct
  misc_feature 1..20: note = Synthetic construct
  source 1..20: mol_type = other DNA
taaaagctcgcacaggtcaa

SEQ ID NO: 3762 - DNA, 20 bp, synthetic construct
  misc_feature 1..20: note = Synthetic construct
  source 1..20: mol_type = other DNA
aaaagctcgcacaggtcaaa

SEQ ID NO: 3763 - DNA, 20 bp, synthetic construct
  misc_feature 1..20: note = Synthetic construct
  source 1..20: mol_type = other DNA
aaagctcgcacaggtcaaac

SEQ ID NO: 3764 - DNA, 20 bp, synthetic construct
  misc_feature 1..20: note = Synthetic construct
  source 1..20: mol_type = other DNA
aagctcgcacaggtcaaacc

SEQ ID NO: 3765 - DNA, 20 bp, synthetic construct
  misc_feature 1..20: note = Synthetic construct
  source 1..20: mol_type = other DNA
agctcgcacaggtcaaacct

SEQ ID NO: 3766 - DNA, 20 bp, synthetic construct
  misc_feature 1..20: note = Synthetic construct
  source 1..20: mol_type = other DNA
gctcgcacaggtcaaacctc

SEQ ID NO: 3767 - DNA, 20 bp, synthetic construct
  misc_feature 1..20: note = Synthetic construct
  source 1..20: mol_type = other DNA
ctcgcacaggtcaaacctcc

SEQ ID NO: 3768 - DNA, 20 bp, synthetic construct
  misc_feature 1..20: note = Synthetic construct
  source 1..20: mol_type = other DNA
tcgcacaggtcaaacctcct

SEQ ID NO: 3769 - DNA, 20 bp, synthetic construct
  misc_feature 1..20: note = Synthetic construct
  source 1..20: mol_type = other DNA
cgcacaggtcaaacctccta

SEQ ID NO: 3770 - DNA, 20 bp, synthetic construct
  misc_feature 1..20: note = Synthetic construct
  source 1..20: mol_type = other DNA
gcacaggtcaaacctcctag

SEQ ID NO: 3771 - DNA, 20 bp, synthetic construct
  misc_feature 1..20: note = Synthetic construct
  source 1..20: mol_type = other DNA
cacaggtcaaacctcctagg

SEQ ID NO: 3772 - DNA, 20 bp, synthetic construct
  misc_feature 1..20: note = Synthetic construct
  source 1..20: mol_type = other DNA
acaggtcaaacctcctagga

SEQ ID NO: 3773 - DNA, 20 bp, synthetic construct
  misc_feature 1..20: note = Synthetic construct
  source 1..20: mol_type = other DNA
caggtcaaacctcctaggaa

SEQ ID NO: 3774 - DNA, 20 bp, synthetic construct
  misc_feature 1..20: note = Synthetic construct
  source 1..20: mol_type = other DNA
aggtcaaacctcctaggaat

SEQ ID NO: 3775 - DNA, 20 bp, synthetic construct
  misc_feature 1..20: note = Synthetic construct
  source 1..20: mol_type = other DNA
ggtcaaacctcctaggaatg

SEQ ID NO: 3776 - DNA, 20 bp, synthetic construct
  misc_feature 1..20: note = Synthetic construct
  source 1..20: mol_type = other DNA
gtcaaacctcctaggaatgg

SEQ ID NO: 3777 - DNA, 20 bp, synthetic construct
  misc_feature 1..20: note = Synthetic construct
  source 1..20: mol_type = other DNA
tcaaacctcctaggaatgga

SEQ ID NO: 3778 - DNA, 20 bp, synthetic construct
  misc_feature 1..20: note = Synthetic construct
  source 1..20: mol_type = other DNA
caaacctcctaggaatggaa

SEQ ID NO: 3779 - DNA, 20 bp, synthetic construct
  misc_feature 1..20: note = Synthetic construct
  source 1..20: mol_type = other DNA
aaacctcctaggaatggaat

SEQ ID NO: 3780 - DNA, 20 bp, synthetic construct
  misc_feature 1..20: note = Synthetic construct
  source 1..20: mol_type = other DNA
aacctcctaggaatggaatt

SEQ ID NO: 3781 - DNA, 20 bp, synthetic construct
  misc_feature 1..20: note = Synthetic construct
  source 1..20: mol_type = other DNA
acctcctaggaatggaattc

SEQ ID NO: 3782 - DNA, 20 bp, synthetic construct
  misc_feature 1..20: note = Synthetic construct
  source 1..20: mol_type = other DNA
cctcctaggaatggaattcc

SEQ ID NO: 3783 - DNA, 20 bp, synthetic construct
  misc_feature 1..20: note = Synthetic construct
  source 1..20: mol_type = other DNA
ctcctaggaatggaattccg

SEQ ID NO: 3784 - DNA, 20 bp, synthetic construct
  misc_feature 1..20: note = Synthetic construct
  source 1..20: mol_type = other DNA
tcctaggaatggaattccgg

SEQ ID NO: 3785 - DNA, 20 bp, synthetic construct
  misc_feature 1..20: note = Synthetic construct
  source 1..20: mol_type = other DNA
cctaggaatggaattccggc

SEQ ID NO: 3786 - DNA, 20 bp, synthetic construct
  misc_feature 1..20: note = Synthetic construct
  source 1..20: mol_type = other DNA
ctaggaatggaattccggct

SEQ ID NO: 3787 - DNA, 20 bp, synthetic construct
  misc_feature 1..20: note = Synthetic construct
  source 1..20: mol_type = other DNA
taggaatggaattccggcta

SEQ ID NO: 3788 - DNA, 20 bp, synthetic construct
  misc_feature 1..20: note = Synthetic construct
  source 1..20: mol_type = other DNA
aggaatggaattccggctac

SEQ ID NO: 3789 - DNA, 20 bp, synthetic construct
  misc_feature 1..20: note = Synthetic construct
  source 1..20: mol_type = other DNA
ggaatggaattccggctacc

SEQ ID NO: 3790 - DNA, 20 bp, synthetic construct
  misc_feature 1..20: note = Synthetic construct
  source 1..20: mol_type = other DNA
gaatggaattccggctacct

SEQ ID NO: 3791 - DNA, 20 bp, synthetic construct
  misc_feature 1..20: note = Synthetic construct
  source 1..20: mol_type = other DNA
aatggaattccggctaccta

SEQ ID NO: 3792 - DNA, 20 bp, synthetic construct
  misc_feature 1..20: note = Synthetic construct
  source 1..20: mol_type = other DNA
atggaattccggctacctac

SEQ ID NO: 3793 - DNA, 20 bp, synthetic construct
  misc_feature 1..20: note = Synthetic construct
  source 1..20: mol_type = other DNA
tggaattccggctacctaca

SEQ ID NO: 3794 - DNA, 20 bp, synthetic construct
  misc_feature 1..20: note = Synthetic construct
  source 1..20: mol_type = other DNA
ggaattccggctacctacag

SEQ ID NO: 3795 - DNA, 20 bp, synthetic construct
  misc_feature 1..20: note = Synthetic construct
  source 1..20: mol_type = other DNA
gaattccggctacctacagc

SEQ ID NO: 3796 - DNA, 20 bp, synthetic construct
  misc_feature 1..20: note = Synthetic construct
  source 1..20: mol_type = other DNA
aattccggctacctacagcg

SEQ ID NO: 3797 - DNA, 20 bp, synthetic construct
  misc_feature 1..20: note = Synthetic construct
  source 1..20: mol_type = other DNA
attccggctacctacagcga

SEQ ID NO: 3798 - DNA, 20 bp, synthetic construct
  misc_feature 1..20: note = Synthetic construct
  source 1..20: mol_type = other DNA
ttccggctacctacagcgat

SEQ ID NO: 3799 - DNA, 20 bp, synthetic construct
  misc_feature 1..20: note = Synthetic construct
  source 1..20: mol_type = other DNA
tccggctacctacagcgata

SEQ ID NO: 3800 - DNA, 20 bp, synthetic construct
  misc_feature 1..20: note = Synthetic construct
  source 1..20: mol_type = other DNA
ccggctacctacagcgatag

SEQ ID NO: 3801 - DNA, 20 bp, synthetic construct
  misc_feature 1..20: note = Synthetic construct
  source 1..20: mol_type = other DNA
cggctacctacagcgatagc

SEQ ID NO: 3802 - DNA, 20 bp, synthetic construct
  misc_feature 1..20: note = Synthetic construct
  source 1..20: mol_type = other DNA
ggctacctacagcgatagcc

SEQ ID NO: 3803 - DNA, 20 bp, synthetic construct
  misc_feature 1..20: note = Synthetic construct
  source 1..20: mol_type = other DNA
gctacctacagcgatagcca

SEQ ID NO: 3804 - DNA, 20 bp, synthetic construct
  misc_feature 1..20: note = Synthetic construct
  source 1..20: mol_type = other DNA
ctacctacagcgatagccat

SEQ ID NO: 3805 - DNA, 20 bp, synthetic construct
  misc_feature 1..20: note = Synthetic construct
  source 1..20: mol_type = other DNA
tacctacagcgatagccatg

SEQ ID NO: 3806 - DNA, 20 bp, synthetic construct
  misc_feature 1..20: note = Synthetic construct
  source 1..20: mol_type = other DNA
acctacagcgatagccatgg

SEQ ID NO: 3807 - DNA, 20 bp, synthetic construct
  misc_feature 1..20: note = Synthetic construct
  source 1..20: mol_type = other DNA
cctacagcgatagccatggt

SEQ ID NO: 3808 - DNA, 20 bp, synthetic construct
  misc_feature 1..20: note = Synthetic construct
  source 1..20: mol_type = other DNA
ctacagcgatagccatggta

SEQ ID NO: 3809 - DNA, 20 bp, synthetic construct
  misc_feature 1..20: note = Synthetic construct
  source 1..20: mol_type = other DNA
tacagcgatagccatggtag

SEQ ID NO: 3810 - DNA, 20 bp, synthetic construct
  misc_feature 1..20: note = Synthetic construct
  source 1..20: mol_type = other DNA
acagcgatagccatggtagc

SEQ ID NO: 3811 - DNA, 20 bp, synthetic construct
  misc_feature 1..20: note = Synthetic construct
  source 1..20: mol_type = other DNA
cagcgatagccatggtagcg

SEQ ID NO: 3812 - DNA, 20 bp, synthetic construct
  misc_feature 1..20: note = Synthetic construct
  source 1..20: mol_type = other DNA
agcgatagccatggtagcgt

SEQ ID NO: 3813 - DNA, 20 bp, synthetic construct
  misc_feature 1..20: note = Synthetic construct
  source 1..20: mol_type = other DNA
gcgatagccatggtagcgtc

SEQ ID NO: 3814 - DNA, 20 bp, synthetic construct
  misc_feature 1..20: note = Synthetic construct
  source 1..20: mol_type = other DNA
cgatagccatggtagcgtct

SEQ ID NO: 3815 - DNA, 20 bp, synthetic construct
  misc_feature 1..20: note = Synthetic construct
  source 1..20: mol_type = other DNA
gatagccatggtagcgtctc

SEQ ID NO: 3816 - DNA, 20 bp, synthetic construct
  misc_feature 1..20: note = Synthetic construct
  source 1..20: mol_type = other DNA
atagccatggtagcgtctcg

SEQ ID NO: 3817 - DNA, 20 bp, synthetic construct
  misc_feature 1..20: note = Synthetic construct
  source 1..20: mol_type = other DNA
tagccatggtagcgtctcgc

SEQ ID NO: 3818 - DNA, 20 bp, synthetic construct
  misc_feature 1..20: note = Synthetic construct
  source 1..20: mol_type = other DNA
agccatggtagcgtctcgct

SEQ ID NO: 3819 - DNA, 20 bp, synthetic construct
  misc_feature 1..20: note = Synthetic construct
  source 1..20: mol_type = other DNA
gccatggtagcgtctcgcta

SEQ ID NO: 3820 - DNA, 20 bp, synthetic construct
  misc_feature 1..20: note = Synthetic construct
  source 1..20: mol_type = other DNA
ccatggtagcgtctcgctaa

SEQ ID NO: 3821 - DNA, 20 bp, synthetic construct
  misc_feature 1..20: note = Synthetic construct
  source 1..20: mol_type = other DNA
catggtagcgtctcgctaaa

SEQ ID NO: 3822 - DNA, 20 bp, synthetic construct
  misc_feature 1..20: note = Synthetic construct
  source 1..20: mol_type = other DNA
atggtagcgtctcgctaaag

SEQ ID NO: 3823 - DNA, 20 bp, synthetic construct
  misc_feature 1..20: note = Synthetic construct
  source 1..20: mol_type = other DNA
tggtagcgtctcgctaaaga

SEQ ID NO: 3824 - DNA, 20 bp, synthetic construct
  misc_feature 1..20: note = Synthetic construct
  source 1..20: mol_type = other DNA
ggtagcgtctcgctaaagac

SEQ ID NO: 3825 - DNA, 20 bp, synthetic construct
  misc_feature 1..20: note = Synthetic construct
  source 1..20: mol_type = other DNA
gtagcgtctcgctaaagaca

SEQ ID NO: 3826 - DNA, 20 bp, synthetic construct
  misc_feature 1..20: note = Synthetic construct
  source 1..20: mol_type = other DNA
tagcgtctcgctaaagacat

SEQ ID NO: 3827 - DNA, 20 bp, synthetic construct
  misc_feature 1..20: note = Synthetic construct
  source 1..20: mol_type = other DNA
agcgtctcgctaaagacatt

SEQ ID NO: 3828 - DNA, 20 bp, synthetic construct
  misc_feature 1..20: note = Synthetic construct
  source 1..20: mol_type = other DNA
gcgtctcgctaaagacatta

SEQ ID NO: 3829 - DNA, 20 bp, synthetic construct
  misc_feature 1..20: note = Synthetic construct
  source 1..20: mol_type = other DNA
cgtctcgctaaagacattaa

SEQ ID NO: 3830 - DNA, 20 bp, synthetic construct
  misc_feature 1..20: note = Synthetic construct
  source 1..20: mol_type = other DNA
gtctcgctaaagacattaaa

SEQ ID NO: 3831 - DNA, 20 bp, synthetic construct
  misc_feature 1..20: note = Synthetic construct
  source 1..20: mol_type = other DNA
tctcgctaaagacattaaaa

SEQ ID NO: 3832 - DNA, 20 bp, synthetic construct
  misc_feature 1..20: note = Synthetic construct
  source 1..20: mol_type = other DNA
ctcgctaaagacattaaaaa

SEQ ID NO: 3833 - DNA, 20 bp, synthetic construct
  misc_feature 1..20: note = Synthetic construct
  source 1..20: mol_type = other DNA
tcgctaaagacattaaaaat

SEQ ID NO: 3834 - DNA, 20 bp, synthetic construct
  misc_feature 1..20: note = Synthetic construct
  source 1..20: mol_type = other DNA
cgctaaagacattaaaaatg

SEQ ID NO: 3835 - DNA, 20 bp, synthetic construct
  misc_feature 1..20: note = Synthetic construct
  source 1..20: mol_type = other DNA
gctaaagacattaaaaatgg

SEQ ID NO: 3836 - DNA, 20 bp, synthetic construct
  misc_feature 1..20: note = Synthetic construct
  source 1..20: mol_type = other DNA
ctaaagacattaaaaatggc

SEQ ID NO: 3837 - DNA, 20 bp, synthetic construct
  misc_feature 1..20: note = Synthetic construct
  source 1..20: mol_type = other DNA
taaagacattaaaaatggca

SEQ ID NO: 3838 - DNA, 20 bp, synthetic construct
  misc_feature 1..20: note = Synthetic construct
  source 1..20: mol_type = other DNA
aaagacattaaaaatggcat

SEQ ID NO: 3839 - DNA, 20 bp, synthetic construct
  misc_feature 1..20: note = Synthetic construct
  source 1..20: mol_type = other DNA
aagacattaaaaatggcatt

SEQ ID NO: 3840 - DNA, 20 bp, synthetic construct
  misc_feature 1..20: note = Synthetic construct
  source 1..20: mol_type = other DNA
agacattaaaaatggcatta

SEQ ID NO: 3841 - DNA, 20 bp, synthetic construct
  misc_feature 1..20: note = Synthetic construct
  source 1..20: mol_type = other DNA
gacattaaaaatggcattag

SEQ ID NO: 3842 - DNA, 20 bp, synthetic construct
  misc_feature 1..20: note = Synthetic construct
  source 1..20: mol_type = other DNA
acattaaaaatggcattagc

SEQ ID NO: 3843 - DNA, 20 bp, synthetic construct
  misc_feature 1..20: note = Synthetic construct
  source 1..20: mol_type = other DNA
cattaaaaatggcattagct

SEQ ID NO: 3844 - DNA, 20 bp, synthetic construct
  misc_feature 1..20: note = Synthetic construct
  source 1..20: mol_type = other DNA
attaaaaatggcattagctc

SEQ ID NO: 3845 - DNA, 20 bp, synthetic construct
  misc_feature 1..20: note = Synthetic construct
  source 1..20: mol_type = other DNA
ttaaaaatggcattagctcg

SEQ ID NO: 3846 - DNA, 20 bp, synthetic construct
  misc_feature 1..20: note = Synthetic construct
  source 1..20: mol_type = other DNA
taaaaatggcattagctcga

SEQ ID NO: 3847 - DNA, 20 bp, synthetic construct
  misc_feature 1..20: note = Synthetic construct
  source 1..20: mol_type = other DNA
aaaaatggcattagctcgac

SEQ ID NO: 3848 - DNA, 20 bp, synthetic construct
  misc_feature 1..20: note = Synthetic construct
  source 1..20: mol_type = other DNA
aaaatggcattagctcgaca

SEQ ID NO: 3849 - DNA, 20 bp, synthetic construct
  misc_feature 1..20: note = Synthetic construct
  source 1..20: mol_type = other DNA
aaatggcattagctcgacag

SEQ ID NO: 3850 - DNA, 20 bp, synthetic construct
  misc_feature 1..20: note = Synthetic construct
  source 1..20: mol_type = other DNA
aatggcattagctcgacagg

SEQ ID NO: 3851 - DNA, 20 bp, synthetic construct
  misc_feature 1..20: note = Synthetic construct
  source 1..20: mol_type = other DNA
atggcattagctcgacagga

SEQ ID NO: 3852 - DNA, 20 bp, synthetic construct
  misc_feature 1..20: note = Synthetic construct
  source 1..20: mol_type = other DNA
tggcattagctcgacaggaa

SEQ ID NO: 3853 - DNA, 20 bp, synthetic construct
  misc_feature 1..20: note = Synthetic construct
  source 1..20: mol_type = other DNA
ggcattagctcgacaggaag

SEQ ID NO: 3854 - DNA, 20 bp, synthetic construct
  misc_feature 1..20: note = Synthetic construct
  source 1..20: mol_type = other DNA
gcattagctcgacaggaagt

SEQ ID NO: 3855 - DNA, 20 bp, synthetic construct
  misc_feature 1..20: note = Synthetic construct
  source 1..20: mol_type = other DNA
cattagctcgacaggaagtt

SEQ ID NO: 3856 - DNA, 20 bp, synthetic construct
  misc_feature 1..20: note = Synthetic construct
  source 1..20: mol_type = other DNA
attagctcgacaggaagttg

SEQ ID NO: 3857 - DNA, 20 bp, synthetic construct
  misc_feature 1..20: note = Synthetic construct
  source 1..20: mol_type = other DNA
ttagctcgacaggaagttga

SEQ ID NO: 3858 - DNA, 20 bp, synthetic construct
  misc_feature 1..20: note = Synthetic construct
  source 1..20: mol_type = other DNA
tagctcgacaggaagttgag

SEQ ID NO: 3859 - DNA, 20 bp, synthetic construct
  misc_feature 1..20: note = Synthetic construct
  source 1..20: mol_type = other DNA
agctcgacaggaagttgagc

SEQ ID NO: 3860 - DNA, 20 bp, synthetic construct
  misc_feature 1..20: note = Synthetic construct
  source 1..20: mol_type = other DNA
gctcgacaggaagttgagca

SEQ ID NO: 3861 - DNA, 20 bp, synthetic construct
  misc_feature 1..20: note = Synthetic construct
  source 1..20: mol_type = other DNA
ctcgacaggaagttgagcag

SEQ ID NO: 3862 - DNA, 20 bp, synthetic construct
  misc_feature 1..20: note = Synthetic construct
  source 1..20: mol_type = other DNA
tcgacaggaagttgagcagg

SEQ ID NO: 3863 - DNA, 20 bp, synthetic construct
  misc_feature 1..20: note = Synthetic construct
  source 1..20: mol_type = other DNA
cgacaggaagttgagcagga

SEQ ID NO: 3864 - DNA, 20 bp, synthetic construct
  misc_feature 1..20: note = Synthetic construct
  source 1..20: mol_type = other DNA
gacaggaagttgagcaggac

SEQ ID NO: 3865 - DNA, 20 bp, synthetic construct
  misc_feature 1..20: note = Synthetic construct
  source 1..20: mol_type = other DNA
acaggaagttgagcaggacc

SEQ ID NO: 3866 - DNA, 20 bp, synthetic construct
  misc_feature 1..20: note = Synthetic construct
  source 1..20: mol_type = other DNA
caggaagttgagcaggaccc

SEQ ID NO: 3867 - DNA, 20 bp, synthetic construct
  misc_feature 1..20: note = Synthetic construct
  source 1..20: mol_type = other DNA
aggaagttgagcaggacccc

SEQ ID NO: 3868 - DNA, 20 bp, synthetic construct
  misc_feature 1..20: note = Synthetic construct
  source 1..20: mol_type = other DNA
ggaagttgagcaggaccccg

SEQ ID NO: 3869 - DNA, 20 bp, synthetic construct
  misc_feature 1..20: note = Synthetic construct
  source 1..20: mol_type = other DNA
gaagttgagcaggaccccga

SEQ ID NO: 3870 - DNA, 20 bp, synthetic construct
  misc_feature 1..20: note = Synthetic construct
  source 1..20: mol_type = other DNA
aagttgagcaggaccccgaa

SEQ ID NO: 3871 - DNA, 20 bp, synthetic construct
  misc_feature 1..20: note = Synthetic construct
  source 1..20: mol_type = other DNA
agttgagcaggaccccgaaa

SEQ ID NO: 3872 - DNA, 20 bp, synthetic construct
  misc_feature 1..20: note = Synthetic construct
  source 1..20: mol_type = other DNA
gttgagcaggaccccgaaag

SEQ ID NO: 3873 - DNA, 20 bp, synthetic construct
  misc_feature 1..20: note = Synthetic construct
  source 1..20: mol_type = other DNA
ttgagcaggaccccgaaagg

SEQ ID NO: 3874 - DNA, 20 bp, synthetic construct
  misc_feature 1..20: note = Synthetic construct
  source 1..20: mol_type = other DNA
tgagcaggaccccgaaaggg

SEQ ID NO: 3875 - DNA, 20 bp, synthetic construct
  misc_feature 1..20: note = Synthetic construct
  source 1..20: mol_type = other DNA
gagcaggaccccgaaagggg

SEQ ID NO: 3876 - DNA, 20 bp, synthetic construct
  misc_feature 1..20: note = Synthetic construct
  source 1..20: mol_type = other DNA
agcaggaccccgaaaggggt

SEQ ID NO: 3877 - DNA, 20 bp, synthetic construct
  misc_feature 1..20: note = Synthetic construct
  source 1..20: mol_type = other DNA
gcaggaccccgaaaggggtc

SEQ ID NO: 3878 - DNA, 20 bp, synthetic construct
  misc_feature 1..20: note = Synthetic construct
  source 1..20: mol_type = other DNA
caggaccccgaaaggggtcc

SEQ ID NO: 3879 - DNA, 20 bp, synthetic construct
  misc_feature 1..20: note = Synthetic construct
  source 1..20: mol_type = other DNA
aggaccccgaaaggggtccc

SEQ ID NO: 3880 - DNA, 20 bp, synthetic construct
  misc_feature 1..20: note = Synthetic construct
  source 1..20: mol_type = other DNA
ggaccccgaaaggggtccca

SEQ ID NO: 3881 - DNA, 20 bp, synthetic construct
  misc_feature 1..20: note = Synthetic construct
  source 1..20: mol_type = other DNA
gaccccgaaaggggtcccac

SEQ ID NO: 3882 - DNA, 20 bp, synthetic construct
  misc_feature 1..20: note = Synthetic construct
  source 1..20: mol_type = other DNA
accccgaaaggggtcccacc

SEQ ID NO: 3883 - DNA, 21 bp, synthetic construct
  misc_feature 1..21: note = Synthetic construct
  source 1..21: mol_type = other DNA
tgggtggtaactagccaagca

SEQ ID NO: 3884 - DNA, 21 bp, synthetic construct
  misc_feature 1..21: note = Synthetic construct
  source 1..21: mol_type = other DNA
gggtggtaactagccaagcag

SEQ ID NO: 3885 - DNA, 21 bp, synthetic construct
  misc_feature 1..21: note = Synthetic construct
  source 1..21: mol_type = other DNA
ggtggtaactagccaagcagc

SEQ ID NO: 3886 - DNA, 21 bp, synthetic construct
  misc_feature 1..21: note = Synthetic construct
  source 1..21: mol_type = other DNA
gtggtaactagccaagcagct

SEQ ID NO: 3887 - DNA, 21 bp, synthetic construct
  misc_feature 1..21: note = Synthetic construct
  source 1..21: mol_type = other DNA
tggtaactagccaagcagcta

SEQ ID NO: 3888 - DNA, 21 bp, synthetic construct
  misc_feature 1..21: note = Synthetic construct
  source 1..21: mol_type = other DNA
ggtaactagccaagcagctag

SEQ ID NO: 3889 - DNA, 21 bp, synthetic construct
  misc_feature 1..21: note = Synthetic construct
  source 1..21: mol_type = other DNA
gtaactagccaagcagctagt

SEQ ID NO: 3890 - DNA, 21 bp, synthetic construct
  misc_feature 1..21: note = Synthetic construct
  source 1..21: mol_type = other DNA
taactagccaagcagctagtt

SEQ ID NO: 3891 - DNA, 21 bp, synthetic construct
  misc_feature 1..21: note = Synthetic construct
  source 1..21: mol_type = other DNA
aactagccaagcagctagtta

SEQ ID NO: 3892 - DNA, 21 bp, synthetic construct
  misc_feature 1..21: note = Synthetic construct
  source 1..21: mol_type = other DNA
actagccaagcagctagttac

SEQ ID NO: 3893 - DNA, 21 bp, synthetic construct
  misc_feature 1..21: note = Synthetic construct
  source 1..21: mol_type = other DNA
ctagccaagcagctagttacc

SEQ ID NO: 3894 - DNA, 21 bp, synthetic construct
  misc_feature 1..21: note = Synthetic construct
  source 1..21: mol_type = other DNA
tagccaagcagctagttacca

SEQ ID NO: 3895 - DNA, 21 bp, synthetic construct
  misc_feature 1..21: note = Synthetic construct
  source 1..21: mol_type = other DNA
agccaagcagctagttaccaa

SEQ ID NO: 3896 - DNA, 21 bp, synthetic construct
  misc_feature 1..21: note = Synthetic construct
  source 1..21: mol_type = other DNA
gccaagcagctagttaccaaa

SEQ ID NO: 3897 - DNA, 21 bp, synthetic construct
  misc_feature 1..21: note = Synthetic construct
  source 1..21: mol_type = other DNA
ccaagcagctagttaccaaat

SEQ ID NO: 3898 - DNA, 21 bp, synthetic construct
  misc_feature 1..21: note = Synthetic construct
  source 1..21: mol_type = other DNA
caagcagctagttaccaaatc

SEQ ID NO: 3899 - DNA, 21 bp, synthetic construct
  misc_feature 1..21: note = Synthetic construct
  source 1..21: mol_type = other DNA
aagcagctagttaccaaatcg

SEQ ID NO: 3900 - DNA, 21 bp, synthetic construct
  misc_feature 1..21: note = Synthetic construct
  source 1..21: mol_type = other DNA
agcagctagttaccaaatcgg

SEQ ID NO: 3901 - DNA, 21 bp, synthetic construct
  misc_feature 1..21: note = Synthetic construct
  source 1..21: mol_type = other DNA
gcagctagttaccaaatcggg

SEQ ID NO: 3902 - DNA, 21 bp, synthetic construct
  misc_feature 1..21: note = Synthetic construct
  source 1..21: mol_type = other DNA
cagctagttaccaaatcggga

SEQ ID NO: 3903 - DNA, 21 bp, synthetic construct
  misc_feature 1..21: note = Synthetic construct
  source 1..21: mol_type = other DNA
agctagttaccaaatcgggag

SEQ ID NO: 3904 - DNA, 21 bp, synthetic construct
  misc_feature 1..21: note = Synthetic construct
  source 1..21: mol_type = other DNA
gctagttaccaaatcgggaga

SEQ ID NO: 3905 - DNA, 21 bp, synthetic construct
  misc_feature 1..21: note = Synthetic construct
  source 1..21: mol_type = other DNA
ctagttaccaaatcgggagaa

SEQ ID NO: 3906 - DNA, 21 bp, synthetic construct
  misc_feature 1..21: note = Synthetic construct
  source 1..21: mol_type = other DNA
tagttaccaaatcgggagaat

SEQ ID NO: 3907 - DNA, 21 bp, synthetic construct
  misc_feature 1..21: note = Synthetic construct
  source 1..21: mol_type = other DNA
agttaccaaatcgggagaatc

SEQ ID NO: 3908 - DNA, 21 bp, synthetic construct
  misc_feature 1..21: note = Synthetic construct
  source 1..21: mol_type = other DNA
gttaccaaatcgggagaatcc

SEQ ID NO: 3909 - DNA, 21 bp, synthetic construct
  misc_feature 1..21: note = Synthetic construct
  source 1..21: mol_type = other DNA
ttaccaaatcgggagaatccc

SEQ ID NO: 3910 - DNA, 21 bp, synthetic construct
  misc_feature 1..21: note = Synthetic construct
  source 1..21: mol_type = other DNA
taccaaatcgggagaatcccg

SEQ ID NO: 3911 - DNA, 21 bp, synthetic construct
  misc_feature 1..21: note = Synthetic construct
  source 1..21: mol_type = other DNA
accaaatcgggagaatcccgg

SEQ ID NO: 3912 - DNA, 21 bp, synthetic construct
  misc_feature 1..21: note = Synthetic construct
  source 1..21: mol_type = other DNA
ccaaatcgggagaatcccggg

SEQ ID NO: 3913 - DNA, 21 bp, synthetic construct
  misc_feature 1..21: note = Synthetic construct
  source 1..21: mol_type = other DNA
caaatcgggagaatcccgggt

SEQ ID NO: 3914 - DNA, 21 bp, synthetic construct
  misc_feature 1..21: note = Synthetic construct
  source 1..21: mol_type = other DNA
aaatcgggagaatcccgggtc

SEQ ID NO: 3915 - DNA, 21 bp, synthetic construct
  misc_feature 1..21: note = Synthetic construct
  source 1..21: mol_type = other DNA
aatcgggagaatcccgggtcc

SEQ ID NO: 3916 - DNA, 21 bp, synthetic construct
  misc_feature 1..21: note = Synthetic construct
  source 1..21: mol_type = other DNA
atcgggagaatcccgggtcct

SEQ ID NO: 3917 - DNA, 21 bp, synthetic construct
  misc_feature 1..21: note = Synthetic construct
  source 1..21: mol_type = other DNA
tcgggagaatcccgggtcctc

SEQ ID NO: 3918 - DNA, 21 bp, synthetic construct
  misc_feature 1..21: note = Synthetic construct
  source 1..21: mol_type = other DNA
cgggagaatcccgggtcctct

SEQ ID NO: 3919 - DNA, 21 bp, synthetic construct
  misc_feature 1..21: note = Synthetic construct
  source 1..21: mol_type = other DNA
gggagaatcccgggtcctctc

SEQ ID NO: 3920 - DNA, 21 bp, synthetic construct
  misc_feature 1..21: note = Synthetic construct
  source 1..21: mol_type = other DNA
ggagaatcccgggtcctctct

SEQ ID NO: 3921 - DNA, 21 bp, synthetic construct
  misc_feature 1..21: note = Synthetic construct
  source 1..21: mol_type = other DNA
gagaatcccgggtcctctctt

SEQ ID NO: 3922 - DNA, 21 bp, synthetic construct
  misc_feature 1..21: note = Synthetic construct
  source 1..21: mol_type = other DNA
agaatcccgggtcctctcttt

SEQ ID NO: 3923 - DNA, 21 bp, synthetic construct
  misc_feature 1..21: note = Synthetic construct
  source 1..21: mol_type = other DNA
gaatcccgggtcctctcttta

SEQ ID NO: 3924 - DNA, 21 bp, synthetic construct
  misc_feature 1..21: note = Synthetic construct
  source 1..21: mol_type = other DNA
aatcccgggtcctctctttag

SEQ ID NO: 3925 - DNA, 21 bp, synthetic construct
  misc_feature 1..21: note = Synthetic construct
  source 1..21: mol_type = other DNA
atcccgggtcctctctttagg

SEQ ID NO: 3926 - DNA, 21 bp, synthetic construct
  misc_feature 1..21: note = Synthetic construct
  source 1..21: mol_type = other DNA
tcccgggtcctctctttaggg

SEQ ID NO: 3927 - DNA, 21 bp, synthetic construct
  misc_feature 1..21: note = Synthetic construct
  source 1..21: mol_type = other DNA
cccgggtcctctctttagggg

SEQ ID NO: 3928 - DNA, 21 bp, synthetic construct
  misc_feature 1..21: note = Synthetic construct
  source 1..21: mol_type = other DNA
ccgggtcctctctttaggggg

SEQ ID NO: 3929 - DNA, 21 bp, synthetic construct
  misc_feature 1..21: note = Synthetic construct
  source 1..21: mol_type = other DNA
cgggtcctctctttaggggga

SEQ ID NO: 3930 - DNA, 21 bp, synthetic construct
  misc_feature 1..21: note = Synthetic construct
  source 1..21: mol_type = other DNA
gggtcctctctttagggggag

SEQ ID NO: 3931 - DNA, 21 bp, synthetic construct
  misc_feature 1..21: note = Synthetic construct
  source 1..21: mol_type = other DNA
ggtcctctctttagggggagg

SEQ ID NO: 3932 - DNA, 21 bp, synthetic construct
  misc_feature 1..21: note = Synthetic construct
  source 1..21: mol_type = other DNA
gtcctctctttagggggaggt

SEQ ID NO: 3933 - DNA, 21 bp, synthetic construct
  misc_feature 1..21: note = Synthetic construct
  source 1..21: mol_type = other DNA
tcctctctttagggggaggtc

SEQ ID NO: 3934 - DNA, 21 bp, synthetic construct
  misc_feature 1..21: note = Synthetic construct
  source 1..21: mol_type = other DNA
cctctctttagggggaggtcc

SEQ ID NO: 3935 - DNA, 21 bp, synthetic construct
  misc_feature 1..21: note = Synthetic construct
  source 1..21: mol_type = other DNA
ctctctttagggggaggtccc

SEQ ID NO: 3936 - DNA, 21 bp, synthetic construct
  misc_feature 1..21: note = Synthetic construct
  source 1..21: mol_type = other DNA
tctctttagggggaggtccct

SEQ ID NO: 3937 - DNA, 21 bp, synthetic construct
  misc_feature 1..21: note = Synthetic construct
  source 1..21: mol_type = other DNA
ctctttagggggaggtccctg

SEQ ID NO: 3938 - DNA, 21 bp, synthetic construct
  misc_feature 1..21: note = Synthetic construct
  source 1..21: mol_type = other DNA
tctttagggggaggtccctgg

SEQ ID NO: 3939 - DNA, 21 bp, synthetic construct
  misc_feature 1..21: note = Synthetic construct
  source 1..21: mol_type = other DNA
ctttagggggaggtccctggg

SEQ ID NO: 3940 - DNA, 21 bp, synthetic construct
  misc_feature 1..21: note = Synthetic construct
  source 1..21: mol_type = other DNA
tttagggggaggtccctgggc

SEQ ID NO: 3941 - DNA, 21 bp, synthetic construct
  misc_feature 1..21: note = Synthetic construct
  source 1..21: mol_type = other DNA
ttagggggaggtccctgggcc

SEQ ID NO: 3942 - DNA, 21 bp, synthetic construct
  misc_feature 1..21: note = Synthetic construct
  source 1..21: mol_type = other DNA
tagggggaggtccctgggccg

SEQ ID NO: 3943 - DNA, 21 bp, synthetic construct
  misc_feature 1..21: note = Synthetic construct
  source 1..21: mol_type = other DNA
agggggaggtccctgggccga

SEQ ID NO: 3944 - DNA, 21 bp, synthetic construct
  misc_feature 1..21: note = Synthetic construct
  source 1..21: mol_type = other DNA
gggggaggtccctgggccgaa

SEQ ID NO: 3945 - DNA, 21 bp, synthetic construct
  misc_feature 1..21: note = Synthetic construct
  source 1..21: mol_type = other DNA
ggggaggtccctgggccgaag

SEQ ID NO: 3946 - DNA, 21 bp, synthetic construct
  misc_feature 1..21: note = Synthetic construct
  source 1..21: mol_type = other DNA
gggaggtccctgggccgaagc

SEQ ID NO: 3947 - DNA, 21 bp, synthetic construct
  misc_feature 1..21: note = Synthetic construct
  source 1..21: mol_type = other DNA
ggaggtccctgggccgaagcc

SEQ ID NO: 3948 - DNA, 21 bp, synthetic construct
  misc_feature 1..21: note = Synthetic construct
  source 1..21: mol_type = other DNA
gaggtccctgggccgaagccc

SEQ ID NO: 3949 - DNA, 21 bp, synthetic construct
  misc_feature 1..21: note = Synthetic construct
  source 1..21: mol_type = other DNA
aggtccctgggccgaagcccg

SEQ ID NO: 3950 - DNA, 21 bp, synthetic construct
  misc_feature 1..21: note = Synthetic construct
  source 1..21: mol_type = other DNA
ggtccctgggccgaagcccgc

SEQ ID NO: 3951 - DNA, 21 bp, synthetic construct
  misc_feature 1..21: note = Synthetic construct
  source 1..21: mol_type = other DNA
gtccctgggccgaagcccgcc

SEQ ID NO: 3952 - DNA, 21 bp, synthetic construct
  misc_feature 1..21: note = Synthetic construct
  source 1..21: mol_type = other DNA
tccctgggccgaagcccgccc

SEQ ID NO: 3953 - DNA, 21 bp, synthetic construct
  misc_feature 1..21: note = Synthetic construct
  source 1..21: mol_type = other DNA
ccctgggccgaagcccgccca

SEQ ID NO: 3954 - DNA, 21 bp, synthetic construct
  misc_feature 1..21: note = Synthetic construct
  source 1..21: mol_type = other DNA
cctgggccgaagcccgcccac

SEQ ID NO: 3955 - DNA, 21 bp, synthetic construct
  misc_feature 1..21: note = Synthetic construct
  source 1..21: mol_type = other DNA
ctgggccgaagcccgcccacc

SEQ ID NO: 3956 - DNA, 21 bp, synthetic construct
  misc_feature 1..21: note = Synthetic construct
  source 1..21: mol_type = other DNA
tgggccgaagcccgcccacct

SEQ ID NO: 3957 - DNA, 21 bp, synthetic construct
  misc_feature 1..21: note = Synthetic construct
  source 1..21: mol_type = other DNA
gggccgaagcccgcccacctt

SEQ ID NO: 3958 - DNA, 21 bp, synthetic construct
  misc_feature 1..21: note = Synthetic construct
  source 1..21: mol_type = other DNA
ggccgaagcccgcccaccttt

SEQ ID NO: 3959 - DNA, 21 bp, synthetic construct
  misc_feature 1..21: note = Synthetic construct
  source 1..21: mol_type = other DNA
gccgaagcccgcccacctttc

SEQ ID NO: 3960 - DNA, 21 bp, synthetic construct
  misc_feature 1..21: note = Synthetic construct
  source 1..21: mol_type = other DNA
ccgaagcccgcccacctttcg

SEQ ID NO: 3961 - DNA, 21 bp, synthetic construct
  misc_feature 1..21: note = Synthetic construct
  source 1..21: mol_type = other DNA
cgaagcccgcccacctttcgg

SEQ ID NO: 3962 - DNA, 21 bp, synthetic construct
  misc_feature 1..21: note = Synthetic construct
  source 1..21: mol_type = other DNA
gaagcccgcccacctttcggt

SEQ ID NO: 3963 - DNA, 21 bp, synthetic construct
  misc_feature 1..21: note = Synthetic construct
  source 1..21: mol_type = other DNA
aagcccgcccacctttcggtg

SEQ ID NO: 3964 - DNA, 21 bp, synthetic construct
  misc_feature 1..21: note = Synthetic construct
  source 1..21: mol_type = other DNA
agcccgcccacctttcggtgg

SEQ ID NO: 3965 - DNA, 21 bp, synthetic construct
  misc_feature 1..21: note = Synthetic construct
  source 1..21: mol_type = other DNA
gcccgcccacctttcggtgga

SEQ ID NO: 3966 - DNA, 21 bp, synthetic construct
  misc_feature 1..21: note = Synthetic construct
  source 1..21: mol_type = other DNA
cccgcccacctttcggtggag

SEQ ID NO: 3967 - DNA, 21 bp, synthetic construct
  misc_feature 1..21: note = Synthetic construct
  source 1..21: mol_type = other DNA
ccgcccacctttcggtggagc

SEQ ID NO: 3968 - DNA, 21 bp, synthetic construct
  misc_feature 1..21: note = Synthetic construct
  source 1..21: mol_type = other DNA
cgcccacctttcggtggagcc

SEQ ID NO: 3969 - DNA, 21 bp, synthetic construct
  misc_feature 1..21: note = Synthetic construct
  source 1..21: mol_type = other DNA
gcccacctttcggtggagccg

SEQ ID NO: 3970 - DNA, 21 bp, synthetic construct
  misc_feature 1..21: note = Synthetic construct
  source 1..21: mol_type = other DNA
cccacctttcggtggagccgg

SEQ ID NO: 3971 - DNA, 21 bp, synthetic construct
  misc_feature 1..21: note = Synthetic construct
  source 1..21: mol_type = other DNA
ccacctttcggtggagccgga

SEQ ID NO: 3972 - DNA, 21 bp, synthetic construct
  misc_feature 1..21: note = Synthetic construct
  source 1..21: mol_type = other DNA
cacctttcggtggagccggac

SEQ ID NO: 3973 - DNA, 21 bp, synthetic construct
  misc_feature 1..21: note = Synthetic construct
  source 1..21: mol_type = other DNA
acctttcggtggagccggacc

SEQ ID NO: 3974 - DNA, 21 bp, synthetic construct
  misc_feature 1..21: note = Synthetic construct
  source 1..21: mol_type = other DNA
cctttcggtggagccggaccg

SEQ ID NO: 3975 - DNA, 21 bp, synthetic construct
  misc_feature 1..21: note = Synthetic construct
  source 1..21: mol_type = other DNA
ctttcggtggagccggaccgc

SEQ ID NO: 3976 - DNA, 21 bp, synthetic construct
  misc_feature 1..21: note = Synthetic construct
  source 1..21: mol_type = other DNA
tttcggtggagccggaccgct

SEQ ID NO: 3977 - DNA, 21 bp, synthetic construct
  misc_feature 1..21: note = Synthetic construct
  source 1..21: mol_type = other DNA
ttcggtggagccggaccgctt

SEQ ID NO: 3978 - DNA, 21 bp, synthetic construct
  misc_feature 1..21: note = Synthetic construct
  source 1..21: mol_type = other DNA
tcggtggagccggaccgcttt

SEQ ID NO: 3979 - DNA, 21 bp, synthetic construct
  misc_feature 1..21: note = Synthetic construct
  source 1..21: mol_type = other DNA
cggtggagccggaccgctttc

SEQ ID NO: 3980 - DNA, 21 bp, synthetic construct
  misc_feature 1..21: note = Synthetic construct
  source 1..21: mol_type = other DNA
ggtggagccggaccgctttcg

SEQ ID NO: 3981 - DNA, 21 bp, synthetic construct
  misc_feature 1..21: note = Synthetic construct
  source 1..21: mol_type = other DNA
gtggagccggaccgctttcgc

SEQ ID NO: 3982 - DNA, 21 bp, synthetic construct
  misc_feature 1..21: note = Synthetic construct
  source 1..21: mol_type = other DNA
tggagccggaccgctttcgca

SEQ ID NO: 3983 - DNA, 21 bp, synthetic construct
  misc_feature 1..21: note = Synthetic construct
  source 1..21: mol_type = other DNA
ggagccggaccgctttcgcac

SEQ ID NO: 3984 - DNA, 21 bp, synthetic construct
  misc_feature 1..21: note = Synthetic construct
  source 1..21: mol_type = other DNA
gagccggaccgctttcgcacc

SEQ ID NO: 3985 - DNA, 21 bp, synthetic construct
  misc_feature 1..21: note = Synthetic construct
  source 1..21: mol_type = other DNA
agccggaccgctttcgcaccc

SEQ ID NO: 3986 - DNA, 21 bp, synthetic construct
  misc_feature 1..21: note = Synthetic construct
  source 1..21: mol_type = other DNA
gccggaccgctttcgcacccg

SEQ ID NO: 3987 - DNA, 21 bp, synthetic construct
  misc_feature 1..21: note = Synthetic construct
  source 1..21: mol_type = other DNA
ccggaccgctttcgcacccgt

SEQ ID NO: 3988 - DNA, 21 bp, synthetic construct
  misc_feature 1..21: note = Synthetic construct
  source 1..21: mol_type = other DNA
cggaccgctttcgcacccgtg

SEQ ID NO: 3989 - DNA, 21 bp, synthetic construct
  misc_feature 1..21: note = Synthetic construct
  source 1..21: mol_type = other DNA
ggaccgctttcgcacccgtgc

SEQ ID NO: 3990 - DNA, 21 bp, synthetic construct
  misc_feature 1..21: note = Synthetic construct
  source 1..21: mol_type = other DNA
gaccgctttcgcacccgtgct

SEQ ID NO: 3991 - DNA, 21 bp, synthetic construct
  misc_feature 1..21: note = Synthetic construct
  source 1..21: mol_type = other DNA
accgctttcgcacccgtgctc

SEQ ID NO: 3992 - DNA, 21 bp, synthetic construct
  misc_feature 1..21: note = Synthetic construct
  source 1..21: mol_type = other DNA
ccgctttcgcacccgtgctct

SEQ ID NO: 3993 - DNA, 21 bp, synthetic construct
  misc_feature 1..21: note = Synthetic construct
  source 1..21: mol_type = other DNA
cgctttcgcacccgtgctctt

SEQ ID NO: 3994 - DNA, 21 bp, synthetic construct
  misc_feature 1..21: note = Synthetic construct
  source 1..21: mol_type = other DNA
gctttcgcacccgtgctcttt

SEQ ID NO: 3995 - DNA, 21 bp, synthetic construct
  misc_feature 1..21: note = Synthetic construct
  source 1..21: mol_type = other DNA
ctttcgcacccgtgctctttc

SEQ ID NO: 3996 - DNA, 21 bp, synthetic construct
  misc_feature 1..21: note = Synthetic construct
  source 1..21: mol_type = other DNA
tttcgcacccgtgctctttcg

SEQ ID NO: 3997 - DNA, 21 bp, synthetic construct
  misc_feature 1..21: note = Synthetic construct
  source 1..21: mol_type = other DNA
ttcgcacccgtgctctttcga

SEQ ID NO: 3998 - DNA, 21 bp, synthetic construct
  misc_feature 1..21: note = Synthetic construct
  source 1..21: mol_type = other DNA
tcgcacccgtgctctttcgag

SEQ ID NO: 3999 - DNA, 21 bp, synthetic construct
  misc_feature 1..21: note = Synthetic construct
  source 1..21: mol_type = other DNA
cgcacccgtgctctttcgagc

SEQ ID NO: 4000 - DNA, 21 bp, synthetic construct
  misc_feature 1..21: note = Synthetic construct
  source 1..21: mol_type = other DNA
gcacccgtgctctttcgagca

SEQ ID NO: 4001 - DNA, 21 bp, synthetic construct
  misc_feature 1..21: note = Synthetic construct
  source 1..21: mol_type = other DNA
cacccgtgctctttcgagcac

SEQ ID NO: 4002 - DNA, 21 bp, synthetic construct
  misc_feature 1..21: note = Synthetic construct
  source 1..21: mol_type = other DNA
acccgtgctctttcgagcaca

SEQ ID NO: 4003 - DNA, 21 bp, synthetic construct
  misc_feature 1..21: note = Synthetic construct
  source 1..21: mol_type = other DNA
cccgtgctctttcgagcacac

SEQ ID NO: 4004 - DNA, 21 bp, synthetic construct
  misc_feature 1..21: note = Synthetic construct
  source 1..21: mol_type = other DNA
ccgtgctctttcgagcacacc

SEQ ID NO: 4005 - DNA, 21 bp, synthetic construct
  misc_feature 1..21: note = Synthetic construct
  source 1..21: mol_type = other DNA
cgtgctctttcgagcacaccc

SEQ ID NO: 4006 - DNA, 21 bp, synthetic construct
  misc_feature 1..21: note = Synthetic construct
  source 1..21: mol_type = other DNA
gtgctctttcgagcacaccca

SEQ ID NO: 4007 - DNA, 21 bp, synthetic construct
  misc_feature 1..21: note = Synthetic construct
  source 1..21: mol_type = other DNA
tgctctttcgagcacacccac

SEQ ID NO: 4008 - DNA, 21 bp, synthetic construct
  misc_feature 1..21: note = Synthetic construct
  source 1..21: mol_type = other DNA
gctctttcgagcacacccacc

SEQ ID NO: 4009 - DNA, 21 bp, synthetic construct
  misc_feature 1..21: note = Synthetic construct
  source 1..21: mol_type = other DNA
ctctttcgagcacacccaccc

SEQ ID NO: 4010 - DNA, 21 bp, synthetic construct
  misc_feature 1..21: note = Synthetic construct
  source 1..21: mol_type = other DNA
tctttcgagcacacccacccc

SEQ ID NO: 4011 - DNA, 21 bp, synthetic construct
  misc_feature 1..21: note = Synthetic construct
  source 1..21: mol_type = other DNA
ctttcgagcacacccaccccg

SEQ ID NO: 4012 - DNA, 21 bp, synthetic construct
  misc_feature 1..21: note = Synthetic construct
  source 1..21: mol_type = other DNA
tttcgagcacacccaccccgt

SEQ ID NO: 4013 - DNA, 21 bp, synthetic construct
  misc_feature 1..21: note = Synthetic construct
  source 1..21: mol_type = other DNA
ttcgagcacacccaccccgtt

SEQ ID NO: 4014 - DNA, 21 bp, synthetic construct
  misc_feature 1..21: note = Synthetic construct
  source 1..21: mol_type = other DNA
tcgagcacacccaccccgttt

SEQ ID NO: 4015 - DNA, 21 bp, synthetic construct
  misc_feature 1..21: note = Synthetic construct
  source 1..21: mol_type = other DNA
cgagcacacccaccccgttta

SEQ ID NO: 4016 - DNA, 21 bp, synthetic construct
  misc_feature 1..21: note = Synthetic construct
  source 1..21: mol_type = other DNA
gagcacacccaccccgtttac

SEQ ID NO: 4017 - DNA, 21 bp, synthetic construct
  misc_feature 1..21: note = Synthetic construct
  source 1..21: mol_type = other DNA
agcacacccaccccgtttacg

SEQ ID NO: 4018 - DNA, 21 bp, synthetic construct
  misc_feature 1..21: note = Synthetic construct
  source 1..21: mol_type = other DNA
gcacacccaccccgtttacgg

SEQ ID NO: 4019 - DNA, 21 bp, synthetic construct
  misc_feature 1..21: note = Synthetic construct
  source 1..21: mol_type = other DNA
cacacccaccccgtttacggg

SEQ ID NO: 4020 - DNA, 21 bp, synthetic construct
  misc_feature 1..21: note = Synthetic construct
  source 1..21: mol_type = other DNA
acacccaccccgtttacgggg

SEQ ID NO: 4021 - DNA, 21 bp, synthetic construct
  misc_feature 1..21: note = Synthetic construct
  source 1..21: mol_type = other DNA
cacccaccccgtttacggggg

SEQ ID NO: 4022 - DNA, 21 bp, synthetic construct
  misc_feature 1..21: note = Synthetic construct
  source 1..21: mol_type = other DNA
acccaccccgtttacgggggt

SEQ ID NO: 4023 - DNA, 21 bp, synthetic construct
  misc_feature 1..21: note = Synthetic construct
  source 1..21: mol_type = other DNA
cccaccccgtttacgggggtc

SEQ ID NO: 4024 - DNA, 21 bp, synthetic construct
  misc_feature 1..21: note = Synthetic construct
  source 1..21: mol_type = other DNA
ccaccccgtttacgggggtcc

SEQ ID NO: 4025 - DNA, 21 bp, synthetic construct
  misc_feature 1..21: note = Synthetic construct
  source 1..21: mol_type = other DNA
caccccgtttacgggggtccc

SEQ ID NO: 4026 - DNA, 21 bp, synthetic construct
  misc_feature 1..21: note = Synthetic construct
  source 1..21: mol_type = other DNA
accccgtttacgggggtccct

SEQ ID NO: 4027 - DNA, 21 bp, synthetic construct
  misc_feature 1..21: note = Synthetic construct
  source 1..21: mol_type = other DNA
ccccgtttacgggggtccctc

SEQ ID NO: 4028 - DNA, 21 bp, synthetic construct
  misc_feature 1..21: note = Synthetic construct
  source 1..21: mol_type = other DNA
cccgtttacgggggtccctcg

SEQ ID NO: 4029 - DNA, 21 bp, synthetic construct
  misc_feature 1..21: note = Synthetic construct
  source 1..21: mol_type = other DNA
ccgtttacgggggtccctcgg

SEQ ID NO: 4030 - DNA, 21 bp, synthetic construct
  misc_feature 1..21: note = Synthetic construct
  source 1..21: mol_type = other DNA
cgtttacgggggtccctcggt

SEQ ID NO: 4031 - DNA, 21 bp, synthetic construct
  misc_feature 1..21: note = Synthetic construct
  source 1..21: mol_type = other DNA
gtttacgggggtccctcggtc

SEQ ID NO: 4032 - DNA, 21 bp, synthetic construct
  misc_feature 1..21: note = Synthetic construct
  source 1..21: mol_type = other DNA
tttacgggggtccctcggtca

SEQ ID NO: 4033 - DNA, 21 bp, synthetic construct
  misc_feature 1..21: note = Synthetic construct
  source 1..21: mol_type = other DNA
ttacgggggtccctcggtcag

SEQ ID NO: 4034 - DNA, 21 bp, synthetic construct
  misc_feature 1..21: note = Synthetic construct
  source 1..21: mol_type = other DNA
tacgggggtccctcggtcagc

SEQ ID NO: 4035 - DNA, 21 bp, synthetic construct
  misc_feature 1..21: note = Synthetic construct
  source 1..21: mol_type = other DNA
acgggggtccctcggtcagct

SEQ ID NO: 4036 - DNA, 21 bp, synthetic construct
  misc_feature 1..21: note = Synthetic construct
  source 1..21: mol_type = other DNA
cgggggtccctcggtcagcta

SEQ ID NO: 4037 - DNA, 21 bp, synthetic construct
  misc_feature 1..21: note = Synthetic construct
  source 1..21: mol_type = other DNA
gggggtccctcggtcagctac

SEQ ID NO: 4038 - DNA, 21 bp, synthetic construct
  misc_feature 1..21: note = Synthetic construct
  source 1..21: mol_type = other DNA
ggggtccctcggtcagctacc

SEQ ID NO: 4039 - DNA, 21 bp, synthetic construct
  misc_feature 1..21: note = Synthetic construct
  source 1..21: mol_type = other DNA
gggtccctcggtcagctaccg

SEQ ID NO: 4040 - DNA, 21 bp, synthetic construct
  misc_feature 1..21: note = Synthetic construct
  source 1..21: mol_type = other DNA
ggtccctcggtcagctaccga

SEQ ID NO: 4041 - DNA, 21 bp, synthetic construct
  misc_feature 1..21: note = Synthetic construct
  source 1..21: mol_type = other DNA
gtccctcggtcagctaccgag

SEQ ID NO: 4042 - DNA, 21 bp, synthetic construct
  misc_feature 1..21: note = Synthetic construct
  source 1..21: mol_type = other DNA
tccctcggtcagctaccgagg

SEQ ID NO: 4043 - DNA, 21 bp, synthetic construct
  misc_feature 1..21: note = Synthetic construct
  source 1..21: mol_type = other DNA
ccctcggtcagctaccgagga

SEQ ID NO: 4044 - DNA, 21 bp, synthetic construct
  misc_feature 1..21: note = Synthetic construct
  source 1..21: mol_type = other DNA
cctcggtcagctaccgaggag

SEQ ID NO: 4045 - DNA, 21 bp, synthetic construct
  misc_feature 1..21: note = Synthetic construct
  source 1..21: mol_type = other DNA
ctcggtcagctaccgaggaga

SEQ ID NO: 4046 - DNA, 21 bp, synthetic construct
  misc_feature 1..21: note = Synthetic construct
  source 1..21: mol_type = other DNA
tcggtcagctaccgaggagag

SEQ ID NO: 4047 - DNA, 21 bp, synthetic construct
  misc_feature 1..21: note = Synthetic construct
  source 1..21: mol_type = other DNA
cggtcagctaccgaggagagc

SEQ ID NO: 4048 - DNA, 21 bp, synthetic construct
  misc_feature 1..21: note = Synthetic construct
  source 1..21: mol_type = other DNA
ggtcagctaccgaggagagct

SEQ ID NO: 4049 - DNA, 21 bp, synthetic construct
  misc_feature 1..21: note = Synthetic construct
  source 1..21: mol_type = other DNA
gtcagctaccgaggagagctc

SEQ ID NO: 4050 - DNA, 21 bp, synthetic construct
  misc_feature 1..21: note = Synthetic construct
  source 1..21: mol_type = other DNA
tcagctaccgaggagagctcg

SEQ ID NO: 4051 - DNA, 21 bp, synthetic construct
  misc_feature 1..21: note = Synthetic construct
  source 1..21: mol_type = other DNA
cagctaccgaggagagctcgc

SEQ ID NO: 4052 - DNA, 21 bp, synthetic construct
  misc_feature 1..21: note = Synthetic construct
  source 1..21: mol_type = other DNA
agctaccgaggagagctcgct

SEQ ID NO: 4053 - DNA, 21 bp, synthetic construct
  misc_feature 1..21: note = Synthetic construct
  source 1..21: mol_type = other DNA
gctaccgaggagagctcgctg

SEQ ID NO: 4054 - DNA, 21 bp, synthetic construct
  misc_feature 1..21: note = Synthetic construct
  source 1..21: mol_type = other DNA
ctaccgaggagagctcgctgg

SEQ ID NO: 4055 - DNA, 21 bp, synthetic construct
  misc_feature 1..21: note = Synthetic construct
  source 1..21: mol_type = other DNA
taccgaggagagctcgctggc

SEQ ID NO: 4056 - DNA, 21 bp, synthetic construct
  misc_feature 1..21: note = Synthetic construct
  source 1..21: mol_type = other DNA
accgaggagagctcgctggcc

SEQ ID NO: 4057 - DNA, 21 bp, synthetic construct
  misc_feature 1..21: note = Synthetic construct
  source 1..21: mol_type = other DNA
ccgaggagagctcgctggccc

SEQ ID NO: 4058 - DNA, 21 bp, synthetic construct
  misc_feature 1..21: note = Synthetic construct
  source 1..21: mol_type = other DNA
cgaggagagctcgctggccca

SEQ ID NO: 4059 - DNA, 21 bp, synthetic construct
  misc_feature 1..21: note = Synthetic construct
  source 1..21: mol_type = other DNA
gaggagagctcgctggcccac

SEQ ID NO: 4060 - DNA, 21 bp, synthetic construct
  misc_feature 1..21: note = Synthetic construct
  source 1..21: mol_type = other DNA
aggagagctcgctggcccaca

SEQ ID NO: 4061 - DNA, 21 bp, synthetic construct
  misc_feature 1..21: note = Synthetic construct
  source 1..21: mol_type = other DNA
ggagagctcgctggcccacac

SEQ ID NO: 4062 - DNA, 21 bp, synthetic construct
  misc_feature 1..21: note = Synthetic construct
  source 1..21: mol_type = other DNA
gagagctcgctggcccacact

SEQ ID NO: 4063 - DNA, 21 bp, synthetic construct
  misc_feature 1..21: note = Synthetic construct
  source 1..21: mol_type = other DNA
agagctcgctggcccacactc

SEQ ID NO: 4064 - DNA, 21 bp, synthetic construct
  misc_feature 1..21: note = Synthetic construct
  source 1..21: mol_type = other DNA
gagctcgctggcccacactcc

SEQ ID NO: 4065 - DNA, 21 bp, synthetic construct
  misc_feature 1..21: note = Synthetic construct
  source 1..21: mol_type = other DNA
agctcgctggcccacactcct

SEQ ID NO: 4066 - DNA, 21 bp, synthetic construct
  misc_feature 1..21: note = Synthetic construct
  source 1..21: mol_type = other DNA
gctcgctggcccacactcctg

SEQ ID NO: 4067 - DNA, 21 bp, synthetic construct
  misc_feature 1..21: note = Synthetic construct
  source 1..21: mol_type = other DNA
ctcgctggcccacactcctga

SEQ ID NO: 4068 - DNA, 21 bp, synthetic construct
  misc_feature 1..21: note = Synthetic construct
  source 1..21: mol_type = other DNA
tcgctggcccacactcctgag

SEQ ID NO: 4069 - DNA, 21 bp, synthetic construct
  misc_feature 1..21: note = Synthetic construct
  source 1..21: mol_type = other DNA
cgctggcccacactcctgagg

SEQ ID NO: 4070 - DNA, 21 bp, synthetic construct
  misc_feature 1..21: note = Synthetic construct
  source 1..21: mol_type = other DNA
gctggcccacactcctgaggg

SEQ ID NO: 4071 - DNA, 21 bp, synthetic construct
  misc_feature 1..21: note = Synthetic construct
  source 1..21: mol_type = other DNA
ctggcccacactcctgaggga

SEQ ID NO: 4072 - DNA, 21 bp, synthetic construct
  misc_feature 1..21: note = Synthetic construct
  source 1..21: mol_type = other DNA
tggcccacactcctgagggaa

SEQ ID NO: 4073 - DNA, 21 bp, synthetic construct
  misc_feature 1..21: note = Synthetic construct
  source 1..21: mol_type = other DNA
ggcccacactcctgagggaat

SEQ ID NO: 4074 - DNA, 21 bp, synthetic construct
  misc_feature 1..21: note = Synthetic construct
  source 1..21: mol_type = other DNA
gcccacactcctgagggaatg

SEQ ID NO: 4075 - DNA, 21 bp, synthetic construct
  misc_feature 1..21: note = Synthetic construct
  source 1..21: mol_type = other DNA
cccacactcctgagggaatgt

SEQ ID NO: 4076 - DNA, 21 bp, synthetic construct
  misc_feature 1..21: note = Synthetic construct
  source 1..21: mol_type = other DNA
ccacactcctgagggaatgtg

SEQ ID NO: 4077 - DNA, 21 bp, synthetic construct
  misc_feature 1..21: note = Synthetic construct
  source 1..21: mol_type = other DNA
cacactcctgagggaatgtgg

SEQ ID NO: 4078 - DNA, 21 bp, synthetic construct
  misc_feature 1..21: note = Synthetic construct
  source 1..21: mol_type = other DNA
acactcctgagggaatgtggg

SEQ ID NO: 4079 - DNA, 21 bp, synthetic construct
  misc_feature 1..21: note = Synthetic construct
  source 1..21: mol_type = other DNA
cactcctgagggaatgtggga

SEQ ID NO: 4080 - DNA, 21 bp, synthetic construct
  misc_feature 1..21: note = Synthetic construct
  source 1..21: mol_type = other DNA
actcctgagggaatgtgggaa

SEQ ID NO: 4081 - DNA, 21 bp, synthetic construct
  misc_feature 1..21: note = Synthetic construct
  source 1..21: mol_type = other DNA
ctcctgagggaatgtgggaac

SEQ ID NO: 4082 - DNA, 21 bp, synthetic construct
  misc_feature 1..21: note = Synthetic construct
  source 1..21: mol_type = other DNA
tcctgagggaatgtgggaacc

SEQ ID NO: 4083 - DNA, 21 bp, synthetic construct
  misc_feature 1..21: note = Synthetic construct
  source 1..21: mol_type = other DNA
cctgagggaatgtgggaaccg

SEQ ID NO: 4084 - DNA, 21 bp, synthetic construct
  misc_feature 1..21: note = Synthetic construct
  source 1..21: mol_type = other DNA
ctgagggaatgtgggaaccgg

SEQ ID NO: 4085 - DNA, 21 bp, synthetic construct
  misc_feature 1..21: note = Synthetic construct
  source 1..21: mol_type = other DNA
tgagggaatgtgggaaccggc

SEQ ID NO: 4086 - DNA, 21 bp, synthetic construct
  misc_feature 1..21: note = Synthetic construct
  source 1..21: mol_type = other DNA
gagggaatgtgggaaccggcg

SEQ ID NO: 4087 - DNA, 21 bp, synthetic construct
  misc_feature 1..21: note = Synthetic construct
  source 1..21: mol_type = other DNA
agggaatgtgggaaccggcgt

SEQ ID NO: 4088 - DNA, 21 bp, synthetic construct
  misc_feature 1..21: note = Synthetic construct
  source 1..21: mol_type = other DNA
gggaatgtgggaaccggcgtt

SEQ ID NO: 4089 - DNA, 21 bp, synthetic construct
  misc_feature 1..21: note = Synthetic construct
  source 1..21: mol_type = other DNA
ggaatgtgggaaccggcgtta

SEQ ID NO: 4090 - DNA, 21 bp, synthetic construct
  misc_feature 1..21: note = Synthetic construct
  source 1..21: mol_type = other DNA
gaatgtgggaaccggcgttag

SEQ ID NO: 4091 - DNA, 21 bp, synthetic construct
  misc_feature 1..21: note = Synthetic construct
  source 1..21: mol_type = other DNA
aatgtgggaaccggcgttagc

SEQ ID NO: 4092 - DNA, 21 bp, synthetic construct
  misc_feature 1..21: note = Synthetic construct
  source 1..21: mol_type = other DNA
atgtgggaaccggcgttagcc

SEQ ID NO: 4093 - DNA, 21 bp, synthetic construct
  misc_feature 1..21: note = Synthetic construct
  source 1..21: mol_type = other DNA
tgtgggaaccggcgttagcca

SEQ ID NO: 4094 - DNA, 21 bp, synthetic construct
  misc_feature 1..21: note = Synthetic construct
  source 1..21: mol_type = other DNA
gtgggaaccggcgttagccac

SEQ ID NO: 4095 - DNA, 21 bp, synthetic construct
  misc_feature 1..21: note = Synthetic construct
  source 1..21: mol_type = other DNA
tgggaaccggcgttagccact

SEQ ID NO: 4096 - DNA, 21 bp, synthetic construct
  misc_feature 1..21: note = Synthetic construct
  source 1..21: mol_type = other DNA
gggaaccggcgttagccactc

SEQ ID NO: 4097 - DNA, 21 bp, synthetic construct
  misc_feature 1..21: note = Synthetic construct
  source 1..21: mol_type = other DNA
ggaaccggcgttagccactcc

SEQ ID NO: 4098 - DNA, 21 bp, synthetic construct
  misc_feature 1..21: note = Synthetic construct
  source 1..21: mol_type = other DNA
gaaccggcgttagccactccg

SEQ ID NO: 4099 - DNA, 21 bp, synthetic construct
  misc_feature 1..21: note = Synthetic construct
  source 1..21: mol_type = other DNA
aaccggcgttagccactccga

SEQ ID NO: 4100 - DNA, 21 bp, synthetic construct
  misc_feature 1..21: note = Synthetic construct
  source 1..21: mol_type = other DNA
accggcgttagccactccgaa

SEQ ID NO: 4101 - DNA, 21 bp, synthetic construct
  misc_feature 1..21: note = Synthetic construct
  source 1..21: mol_type = other DNA
ccggcgttagccactccgaag

SEQ ID NO: 4102 - DNA, 21 bp, synthetic construct
  misc_feature 1..21: note = Synthetic construct
  source 1..21: mol_type = other DNA
cggcgttagccactccgaagt

SEQ ID NO: 4103 - DNA, 21 bp, synthetic construct
  misc_feature 1..21: note = Synthetic construct
  source 1..21: mol_type = other DNA
ggcgttagccactccgaagtg

SEQ ID NO: 4104 - DNA, 21 bp, synthetic construct
  misc_feature 1..21: note = Synthetic construct
  source 1..21: mol_type = other DNA
gcgttagccactccgaagtgc

SEQ ID NO: 4105 - DNA, 21 bp, synthetic construct
  misc_feature 1..21: note = Synthetic construct
  source 1..21: mol_type = other DNA
cgttagccactccgaagtgcg

SEQ ID NO: 4106 - DNA, 21 bp, synthetic construct
  misc_feature 1..21: note = Synthetic construct
  source 1..21: mol_type = other DNA
gttagccactccgaagtgcgt

SEQ ID NO: 4107 - DNA, 21 bp, synthetic construct
  misc_feature 1..21: note = Synthetic construct
  source 1..21: mol_type = other DNA
ttagccactccgaagtgcgta

SEQ ID NO: 4108 - DNA, 21 bp, synthetic construct
  misc_feature 1..21: note = Synthetic construct
  source 1..21: mol_type = other DNA
tagccactccgaagtgcgtat

SEQ ID NO: 4109 - DNA, 21 bp, synthetic construct
  misc_feature 1..21: note = Synthetic construct
  source 1..21: mol_type = other DNA
agccactccgaagtgcgtata

SEQ ID NO: 4110 - DNA, 21 bp, synthetic construct
  misc_feature 1..21: note = Synthetic construct
  source 1..21: mol_type = other DNA
gccactccgaagtgcgtataa

SEQ ID NO: 4111 - DNA, 21 bp, synthetic construct
  misc_feature 1..21: note = Synthetic construct
  source 1..21: mol_type = other DNA
ccactccgaagtgcgtataac

SEQ ID NO: 4112 - DNA, 21 bp, synthetic construct
  misc_feature 1..21: note = Synthetic construct
  source 1..21: mol_type = other DNA
cactccgaagtgcgtataacg

SEQ ID NO: 4113 - DNA, 21 bp, synthetic construct
  misc_feature 1..21: note = Synthetic construct
  source 1..21: mol_type = other DNA
actccgaagtgcgtataacgc

SEQ ID NO: 4114 - DNA, 21 bp, synthetic construct
  misc_feature 1..21: note = Synthetic construct
  source 1..21: mol_type = other DNA
ctccgaagtgcgtataacgcg

SEQ ID NO: 4115 - DNA, 21 bp, synthetic construct
  misc_feature 1..21: note = Synthetic construct
  source 1..21: mol_type = other DNA
tccgaagtgcgtataacgcgc

SEQ ID NO: 4116 - DNA, 21 bp, synthetic construct
  misc_feature 1..21: note = Synthetic construct
  source 1..21: mol_type = other DNA
ccgaagtgcgtataacgcgca

SEQ ID NO: 4117 - DNA, 21 bp, synthetic construct
  misc_feature 1..21: note = Synthetic construct
  source 1..21: mol_type = other DNA
cgaagtgcgtataacgcgcac

SEQ ID NO: 4118 - DNA, 21 bp, synthetic construct
  misc_feature 1..21: note = Synthetic construct
  source 1..21: mol_type = other DNA
gaagtgcgtataacgcgcacg

SEQ ID NO: 4119 - DNA, 21 bp, synthetic construct
  misc_feature 1..21: note = Synthetic construct
  source 1..21: mol_type = other DNA
aagtgcgtataacgcgcacgc

SEQ ID NO: 4120 - DNA, 21 bp, synthetic construct
  misc_feature 1..21: note = Synthetic construct
  source 1..21: mol_type = other DNA
agtgcgtataacgcgcacgcc

SEQ ID NO: 4121 - DNA, 21 bp, synthetic construct
  misc_feature 1..21: note = Synthetic construct
  source 1..21: mol_type = other DNA
gtgcgtataacgcgcacgccg

SEQ ID NO: 4122 - DNA, 21 bp, synthetic construct
  misc_feature 1..21: note = Synthetic construct
  source 1..21: mol_type = other DNA
tgcgtataacgcgcacgccgg

SEQ ID NO: 4123 - DNA, 21 bp, synthetic construct
  misc_feature 1..21: note = Synthetic construct
  source 1..21: mol_type = other DNA
gcgtataacgcgcacgccggc

SEQ ID NO: 4124 - DNA, 21 bp, synthetic construct
  misc_feature 1..21: note = Synthetic construct
  source 1..21: mol_type = other DNA
cgtataacgcgcacgccggcg

SEQ ID NO: 4125 - DNA, 21 bp, synthetic construct
  misc_feature 1..21: note = Synthetic construct
  source 1..21: mol_type = other DNA
gtataacgcgcacgccggcgg

SEQ ID NO: 4126 - DNA, 21 bp, synthetic construct
  misc_feature 1..21: note = Synthetic construct
  source 1..21: mol_type = other DNA
tataacgcgcacgccggcgga

SEQ ID NO: 4127 - DNA, 21 bp, synthetic construct
  misc_feature 1..21: note = Synthetic construct
  source 1..21: mol_type = other DNA
ataacgcgcacgccggcggac

SEQ ID NO: 4128 - DNA, 21 bp, synthetic construct
  misc_feature 1..21: note = Synthetic construct
  source 1..21: mol_type = other DNA
taacgcgcacgccggcggact

SEQ ID NO: 4129 - DNA, 21 bp, synthetic construct
  misc_feature 1..21: note = Synthetic construct
  source 1..21: mol_type = other DNA
aacgcgcacgccggcggactt

SEQ ID NO: 4130 - DNA, 21 bp, synthetic construct
  misc_feature 1..21: note = Synthetic construct
  source 1..21: mol_type = other DNA
acgcgcacgccggcggacttc

SEQ ID NO: 4131 - DNA, 21 bp, synthetic construct
  misc_feature 1..21: note = Synthetic construct
  source 1..21: mol_type = other DNA
cgcgcacgccggcggacttca

SEQ ID NO: 4132 - DNA, 21 bp, synthetic construct
  misc_feature 1..21: note = Synthetic construct
  source 1..21: mol_type = other DNA
gcgcacgccggcggacttcat

SEQ ID NO: 4133 - DNA, 21 bp, synthetic construct
  misc_feature 1..21: note = Synthetic construct
  source 1..21: mol_type = other DNA
cgcacgccggcggacttcatg

SEQ ID NO: 4134 - DNA, 21 bp, synthetic construct
  misc_feature 1..21: note = Synthetic construct
  source 1..21: mol_type = other DNA
gcacgccggcggacttcatgc

SEQ ID NO: 4135 - DNA, 21 bp, synthetic construct
  misc_feature 1..21: note = Synthetic construct
  source 1..21: mol_type = other DNA
cacgccggcggacttcatgct

SEQ ID NO: 4136 - DNA, 21 bp, synthetic construct
  misc_feature 1..21: note = Synthetic construct
  source 1..21: mol_type = other DNA
acgccggcggacttcatgctg

SEQ ID NO: 4137 - DNA, 21 bp, synthetic construct
  misc_feature 1..21: note = Synthetic construct
  source 1..21: mol_type = other DNA
cgccggcggacttcatgctgt

SEQ ID NO: 4138 - DNA, 21 bp, synthetic construct
  misc_feature 1..21: note = Synthetic construct
  source 1..21: mol_type = other DNA
gccggcggacttcatgctgtc

SEQ ID NO: 4139 - DNA, 21 bp, synthetic construct
  misc_feature 1..21: note = Synthetic construct
  source 1..21: mol_type = other DNA
ccggcggacttcatgctgtcg

SEQ ID NO: 4140 - DNA, 21 bp, synthetic construct
  misc_feature 1..21: note = Synthetic construct
  source 1..21: mol_type = other DNA
cggcggacttcatgctgtcgg

SEQ ID NO: 4141 - DNA, 21 bp, synthetic construct
  misc_feature 1..21: note = Synthetic construct
  source 1..21: mol_type = other DNA
ggcggacttcatgctgtcggt

SEQ ID NO: 4142 - DNA, 21 bp, synthetic construct
  misc_feature 1..21: note = Synthetic construct
  source 1..21: mol_type = other DNA
gcggacttcatgctgtcggtg

SEQ ID NO: 4143 - DNA, 21 bp, synthetic construct
  misc_feature 1..21: note = Synthetic construct
  source 1..21: mol_type = other DNA
cggacttcatgctgtcggtga

SEQ ID NO: 4144 - DNA, 21 bp, synthetic construct
  misc_feature 1..21: note = Synthetic construct
  source 1..21: mol_type = other DNA
ggacttcatgctgtcggtgat

SEQ ID NO: 4145 - DNA, 21 bp, synthetic construct
  misc_feature 1..21: note = Synthetic construct
  source 1..21: mol_type = other DNA
gacttcatgctgtcggtgatt

SEQ ID NO: 4146 - DNA, 21 bp, synthetic construct
  misc_feature 1..21: note = Synthetic construct
  source 1..21: mol_type = other DNA
acttcatgctgtcggtgattt

SEQ ID NO: 4147 - DNA, 21 bp, synthetic construct
  misc_feature 1..21: note = Synthetic construct
  source 1..21: mol_type = other DNA
cttcatgctgtcggtgatttc

SEQ ID NO: 4148 - DNA, 21 bp, synthetic construct
  misc_feature 1..21: note = Synthetic construct
  source 1..21: mol_type = other DNA
ttcatgctgtcggtgatttca

SEQ ID NO: 4149 - DNA, 21 bp, synthetic construct
  misc_feature 1..21: note = Synthetic construct
  source 1..21: mol_type = other DNA
tcatgctgtcggtgatttcac

SEQ ID NO: 4150 - DNA, 21 bp, synthetic construct
  misc_feature 1..21: note = Synthetic construct
  source 1..21: mol_type = other DNA
catgctgtcggtgatttcacc

SEQ ID NO: 4151 - DNA, 21 bp, synthetic construct
  misc_feature 1..21: note = Synthetic construct
  source 1..21: mol_type = other DNA
atgctgtcggtgatttcacct

SEQ ID NO: 4152 - DNA, 21 bp, synthetic construct
  misc_feature 1..21: note = Synthetic construct
  source 1..21: mol_type = other DNA
tgctgtcggtgatttcacctc

SEQ ID NO: 4153 - DNA, 21 bp, synthetic construct
  misc_feature 1..21: note = Synthetic construct
  source 1..21: mol_type = other DNA
gctgtcggtgatttcacctcc

SEQ ID NO: 4154 - DNA, 21 bp, synthetic construct
  misc_feature 1..21: note = Synthetic construct
  source 1..21: mol_type = other DNA
ctgtcggtgatttcacctcca

SEQ ID NO: 4155 - DNA, 21 bp, synthetic construct
  misc_feature 1..21: note = Synthetic construct
  source 1..21: mol_type = other DNA
tgtcggtgatttcacctccag

SEQ ID NO: 4156 - DNA, 21 bp, synthetic construct
  misc_feature 1..21: note = Synthetic construct
  source 1..21: mol_type = other DNA
gtcggtgatttcacctccagt

SEQ ID NO: 4157 - DNA, 21 bp, synthetic construct
  misc_feature 1..21: note = Synthetic construct
  source 1..21: mol_type = other DNA
tcggtgatttcacctccagta

SEQ ID NO: 4158 - DNA, 21 bp, synthetic construct
  misc_feature 1..21: note = Synthetic construct
  source 1..21: mol_type = other DNA
cggtgatttcacctccagtat

SEQ ID NO: 4159 - DNA, 21 bp, synthetic construct
  misc_feature 1..21: note = Synthetic construct
  source 1..21: mol_type = other DNA
ggtgatttcacctccagtatg

SEQ ID NO: 4160 - DNA, 21 bp, synthetic construct
  misc_feature 1..21: note = Synthetic construct
  source 1..21: mol_type = other DNA
gtgatttcacctccagtatgg

SEQ ID NO: 4161 - DNA, 21 bp, synthetic construct
  misc_feature 1..21: note = Synthetic construct
  source 1..21: mol_type = other DNA
tgatttcacctccagtatgga

SEQ ID NO: 4162 - DNA, 21 bp, synthetic construct
  misc_feature 1..21: note = Synthetic construct
  source 1..21: mol_type = other DNA
gatttcacctccagtatggaa

SEQ ID NO: 4163 - DNA, 21 bp, synthetic construct
  misc_feature 1..21: note = Synthetic construct
  source 1..21: mol_type = other DNA
atttcacctccagtatggaac

SEQ ID NO: 4164 - DNA, 21 bp, synthetic construct
  misc_feature 1..21: note = Synthetic construct
  source 1..21: mol_type = other DNA
tttcacctccagtatggaacc

SEQ ID NO: 4165 - DNA, 21 bp, synthetic construct
  misc_feature 1..21: note = Synthetic construct
  source 1..21: mol_type = other DNA
ttcacctccagtatggaacca

SEQ ID NO: 4166 - DNA, 21 bp, synthetic construct
  misc_feature 1..21: note = Synthetic construct
  source 1..21: mol_type = other DNA
tcacctccagtatggaaccac

SEQ ID NO: 4167 - DNA, 21 bp, synthetic construct
  misc_feature 1..21: note = Synthetic construct
  source 1..21: mol_type = other DNA
cacctccagtatggaaccacg

SEQ ID NO: 4168 - DNA, 21 bp, synthetic construct
  misc_feature 1..21: note = Synthetic construct
  source 1..21: mol_type = other DNA
acctccagtatggaaccacgc

SEQ ID NO: 4169 - DNA, 21 bp, synthetic construct
  misc_feature 1..21: note = Synthetic construct
  source 1..21: mol_type = other DNA
cctccagtatggaaccacgct

SEQ ID NO: 4170 - DNA, 21 bp, synthetic construct
  misc_feature 1..21: note = Synthetic construct
  source 1..21: mol_type = other DNA
ctccagtatggaaccacgcta

SEQ ID NO: 4171 - DNA, 21 bp, synthetic construct
  misc_feature 1..21: note = Synthetic construct
  source 1..21: mol_type = other DNA
tccagtatggaaccacgctat

SEQ ID NO: 4172 - DNA, 21 bp, synthetic construct
  misc_feature 1..21: note = Synthetic construct
  source 1..21: mol_type = other DNA
ccagtatggaaccacgctatg

SEQ ID NO: 4173 - DNA, 21 bp, synthetic construct
  misc_feature 1..21: note = Synthetic construct
  source 1..21: mol_type = other DNA
cagtatggaaccacgctatgt

SEQ ID NO: 4174 - DNA, 21 bp, synthetic construct
  misc_feature 1..21: note = Synthetic construct
  source 1..21: mol_type = other DNA
agtatggaaccacgctatgta

SEQ ID NO: 4175 - DNA, 21 bp, synthetic construct
  misc_feature 1..21: note = Synthetic construct
  source 1..21: mol_type = other DNA
gtatggaaccacgctatgtag

SEQ ID NO: 4176 - DNA, 21 bp, synthetic construct
  misc_feature 1..21: note = Synthetic construct
  source 1..21: mol_type = other DNA
tatggaaccacgctatgtagc

SEQ ID NO: 4177 - DNA, 21 bp, synthetic construct
  misc_feature 1..21: note = Synthetic construct
  source 1..21: mol_type = other DNA
atggaaccacgctatgtagcg

SEQ ID NO: 4178 - DNA, 21 bp, synthetic construct
  misc_feature 1..21: note = Synthetic construct
  source 1..21: mol_type = other DNA
tggaaccacgctatgtagcga

SEQ ID NO: 4179 - DNA, 21 bp, synthetic construct
  misc_feature 1..21: note = Synthetic construct
  source 1..21: mol_type = other DNA
ggaaccacgctatgtagcgac

SEQ ID NO: 4180 - DNA, 21 bp, synthetic construct
  misc_feature 1..21: note = Synthetic construct
  source 1..21: mol_type = other DNA
gaaccacgctatgtagcgacc

SEQ ID NO: 4181 - DNA, 21 bp, synthetic construct
  misc_feature 1..21: note = Synthetic construct
  source 1..21: mol_type = other DNA
aaccacgctatgtagcgacca

SEQ ID NO: 4182 - DNA, 21 bp, synthetic construct
  misc_feature 1..21: note = Synthetic construct
  source 1..21: mol_type = other DNA
accacgctatgtagcgaccac

SEQ ID NO: 4183 - DNA, 21 bp, synthetic construct
  misc_feature 1..21: note = Synthetic construct
  source 1..21: mol_type = other DNA
ccacgctatgtagcgaccact

SEQ ID NO: 4184 - DNA, 21 bp, synthetic construct
  misc_feature 1..21: note = Synthetic construct
  source 1..21: mol_type = other DNA
cacgctatgtagcgaccactg

SEQ ID NO: 4185 - DNA, 21 bp, synthetic construct
  misc_feature 1..21: note = Synthetic construct
  source 1..21: mol_type = other DNA
acgctatgtagcgaccactgt

SEQ ID NO: 4186 - DNA, 21 bp, synthetic construct
  misc_feature 1..21: note = Synthetic construct
  source 1..21: mol_type = other DNA
cgctatgtagcgaccactgtc

SEQ ID NO: 4187 - DNA, 21 bp, synthetic construct
  misc_feature 1..21: note = Synthetic construct
  source 1..21: mol_type = other DNA
gctatgtagcgaccactgtcg

SEQ ID NO: 4188 - DNA, 21 bp, synthetic construct
  misc_feature 1..21: note = Synthetic construct
  source 1..21: mol_type = other DNA
ctatgtagcgaccactgtcgt

SEQ ID NO: 4189 - DNA, 21 bp, synthetic construct
  misc_feature 1..21: note = Synthetic construct
  source 1..21: mol_type = other DNA
tatgtagcgaccactgtcgtg

SEQ ID NO: 4190 - DNA, 21 bp, synthetic construct
  misc_feature 1..21: note = Synthetic construct
  source 1..21: mol_type = other DNA
atgtagcgaccactgtcgtgc

SEQ ID NO: 4191 - DNA, 21 bp, synthetic construct
  misc_feature 1..21: note = Synthetic construct
  source 1..21: mol_type = other DNA
tgtagcgaccactgtcgtgct

SEQ ID NO: 4192 - DNA, 21 bp, synthetic construct
  misc_feature 1..21: note = Synthetic construct
  source 1..21: mol_type = other DNA
gtagcgaccactgtcgtgctt

SEQ ID NO: 4193 - DNA, 21 bp, synthetic construct
  misc_feature 1..21: note = Synthetic construct
  source 1..21: mol_type = other DNA
tagcgaccactgtcgtgcttt

SEQ ID NO: 4194 - DNA, 21 bp, synthetic construct
  misc_feature 1..21: note = Synthetic construct
  source 1..21: mol_type = other DNA
agcgaccactgtcgtgctttt

SEQ ID NO: 4195 - DNA, 21 bp, synthetic construct
  misc_feature 1..21: note = Synthetic construct
  source 1..21: mol_type = other DNA
gcgaccactgtcgtgcttttc

SEQ ID NO: 4196 - DNA, 21 bp, synthetic construct
  misc_feature 1..21: note = Synthetic construct
  source 1..21: mol_type = other DNA
cgaccactgtcgtgcttttcg

SEQ ID NO: 4197 - DNA, 21 bp, synthetic construct
  misc_feature 1..21: note = Synthetic construct
  source 1..21: mol_type = other DNA
gaccactgtcgtgcttttcgc

SEQ ID NO: 4198 - DNA, 21 bp, synthetic construct
  misc_feature 1..21: note = Synthetic construct
  source 1..21: mol_type = other DNA
accactgtcgtgcttttcgct

SEQ ID NO: 4199 - DNA, 21 bp, synthetic construct
  misc_feature 1..21: note = Synthetic construct
  source 1..21: mol_type = other DNA
ccactgtcgtgcttttcgctg

SEQ ID NO: 4200 - DNA, 21 bp, synthetic construct
  misc_feature 1..21: note = Synthetic construct
  source 1..21: mol_type = other DNA
cactgtcgtgcttttcgctga

SEQ ID NO: 4201 - DNA, 21 bp, synthetic construct
  misc_feature 1..21: note = Synthetic construct
  source 1..21: mol_type = other DNA
actgtcgtgcttttcgctgaa

SEQ ID NO: 4202 - DNA, 21 bp, synthetic construct
  misc_feature 1..21: note = Synthetic construct
  source 1..21: mol_type = other DNA
ctgtcgtgcttttcgctgaag

SEQ ID NO: 4203 - DNA, 21 bp, synthetic construct
  misc_feature 1..21: note = Synthetic construct
  source 1..21: mol_type = other DNA
tgtcgtgcttttcgctgaaga

SEQ ID NO: 4204 - DNA, 21 bp, synthetic construct
  misc_feature 1..21: note = Synthetic construct
  source 1..21: mol_type = other DNA
gtcgtgcttttcgctgaagaa

SEQ ID NO: 4205 - DNA, 21 bp, synthetic construct
  misc_feature 1..21: note = Synthetic construct
  source 1..21: mol_type = other DNA
tcgtgcttttcgctgaagaac

SEQ ID NO: 4206 - DNA, 21 bp, synthetic construct
  misc_feature 1..21: note = Synthetic construct
  source 1..21: mol_type = other DNA
cgtgcttttcgctgaagaact

SEQ ID NO: 4207 - DNA, 21 bp, synthetic construct
  misc_feature 1..21: note = Synthetic construct
  source 1..21: mol_type = other DNA
gtgcttttcgctgaagaactt

SEQ ID NO: 4208 - DNA, 21 bp, synthetic construct
  misc_feature 1..21: note = Synthetic construct
  source 1..21: mol_type = other DNA
tgcttttcgctgaagaacttg

SEQ ID NO: 4209 - DNA, 21 bp, synthetic construct
  misc_feature 1..21: note = Synthetic construct
  source 1..21: mol_type = other DNA
gcttttcgctgaagaacttgc

SEQ ID NO: 4210 - DNA, 21 bp, synthetic construct
  misc_feature 1..21: note = Synthetic construct
  source 1..21: mol_type = other DNA
cttttcgctgaagaacttgcg

SEQ ID NO: 4211 - DNA, 21 bp, synthetic construct
  misc_feature 1..21: note = Synthetic construct
  source 1..21: mol_type = other DNA
ttttcgctgaagaacttgcgt

SEQ ID NO: 4212 - DNA, 21 bp, synthetic construct
  misc_feature 1..21: note = Synthetic construct
  source 1..21: mol_type = other DNA
tttcgctgaagaacttgcgtt

SEQ ID NO: 4213 - DNA, 21 bp, synthetic construct
  misc_feature 1..21: note = Synthetic construct
  source 1..21: mol_type = other DNA
ttcgctgaagaacttgcgttc

SEQ ID NO: 4214 - DNA, 21 bp, synthetic construct
  misc_feature 1..21: note = Synthetic construct
  source 1..21: mol_type = other DNA
tcgctgaagaacttgcgttct

SEQ ID NO: 4215 - DNA, 21 bp, synthetic construct
  misc_feature 1..21: note = Synthetic construct
  source 1..21: mol_type = other DNA
cgctgaagaacttgcgttctc

SEQ ID NO: 4216 - DNA, 21 bp, synthetic construct
  misc_feature 1..21: note = Synthetic construct
  source 1..21: mol_type = other DNA
gctgaagaacttgcgttctcg

SEQ ID NO: 4217 - DNA, 21 bp, synthetic construct
  misc_feature 1..21: note = Synthetic construct
  source 1..21: mol_type = other DNA
ctgaagaacttgcgttctcga

SEQ ID NO: 4218 - DNA, 21 bp, synthetic construct
  misc_feature 1..21: note = Synthetic construct
  source 1..21: mol_type = other DNA
tgaagaacttgcgttctcgag

SEQ ID NO: 4219 - DNA, 21 bp, synthetic construct
  misc_feature 1..21: note = Synthetic construct
  source 1..21: mol_type = other DNA
gaagaacttgcgttctcgagc

SEQ ID NO: 4220 - DNA, 21 bp, synthetic construct
  misc_feature 1..21: note = Synthetic construct
  source 1..21: mol_type = other DNA
aagaacttgcgttctcgagcg

SEQ ID NO: 4221 - DNA, 21 bp, synthetic construct
  misc_feature 1..21: note = Synthetic construct
  source 1..21: mol_type = other DNA
agaacttgcgttctcgagcga

SEQ ID NO: 4222 - DNA, 21 bp, synthetic construct
  misc_feature 1..21: note = Synthetic construct
  source 1..21: mol_type = other DNA
gaacttgcgttctcgagcgat

SEQ ID NO: 4223 - DNA, 21 bp, synthetic construct
  misc_feature 1..21: note = Synthetic construct
  source 1..21: mol_type = other DNA
aacttgcgttctcgagcgata

SEQ ID NO: 4224 - DNA, 21 bp, synthetic construct
  misc_feature 1..21: note = Synthetic construct
  source 1..21: mol_type = other DNA
acttgcgttctcgagcgatac

SEQ ID NO: 4225 - DNA, 21 bp, synthetic construct
  misc_feature 1..21: note = Synthetic construct
  source 1..21: mol_type = other DNA
cttgcgttctcgagcgatacg

SEQ ID NO: 4226 - DNA, 21 bp, synthetic construct
  misc_feature 1..21: note = Synthetic construct
  source 1..21: mol_type = other DNA
ttgcgttctcgagcgatacga

SEQ ID NO: 4227 - DNA, 21 bp, synthetic construct
  misc_feature 1..21: note = Synthetic construct
  source 1..21: mol_type = other DNA
tgcgttctcgagcgatacgag

SEQ ID NO: 4228 - DNA, 21 bp, synthetic construct
  misc_feature 1..21: note = Synthetic construct
  source 1..21: mol_type = other DNA
gcgttctcgagcgatacgagc

SEQ ID NO: 4229 - DNA, 21 bp, synthetic construct
  misc_feature 1..21: note = Synthetic construct
  source 1..21: mol_type = other DNA
cgttctcgagcgatacgagca

SEQ ID NO: 4230 - DNA, 21 bp, synthetic construct
  misc_feature 1..21: note = Synthetic construct
  source 1..21: mol_type = other DNA
gttctcgagcgatacgagcaa

SEQ ID NO: 4231 - DNA, 21 bp, synthetic construct
  misc_feature 1..21: note = Synthetic construct
  source 1..21: mol_type = other DNA
ttctcgagcgatacgagcaag

SEQ ID NO: 4232 - DNA, 21 bp, synthetic construct
  misc_feature 1..21: note = Synthetic construct
  source 1..21: mol_type = other DNA
tctcgagcgatacgagcaaga

SEQ ID NO: 4233 - DNA, 21 bp, synthetic construct
  misc_feature 1..21: note = Synthetic construct
  source 1..21: mol_type = other DNA
ctcgagcgatacgagcaagac

SEQ ID NO: 4234 - DNA, 21 bp, synthetic construct
  misc_feature 1..21: note = Synthetic construct
  source 1..21: mol_type = other DNA
tcgagcgatacgagcaagacg

SEQ ID NO: 4235 - DNA, 21 bp, synthetic construct
  misc_feature 1..21: note = Synthetic construct
  source 1..21: mol_type = other DNA
cgagcgatacgagcaagacgg

SEQ ID NO: 4236 - DNA, 21 bp, synthetic construct
  misc_feature 1..21: note = Synthetic construct
  source 1..21: mol_type = other DNA
gagcgatacgagcaagacgga

SEQ ID NO: 4237 - DNA, 21 bp, synthetic construct
  misc_feature 1..21: note = Synthetic construct
  source 1..21: mol_type = other DNA
agcgatacgagcaagacggaa

SEQ ID NO: 4238 - DNA, 21 bp, synthetic construct
  misc_feature 1..21: note = Synthetic construct
  source 1..21: mol_type = other DNA
gcgatacgagcaagacggaaa

SEQ ID NO: 4239 - DNA, 21 bp, synthetic construct
  misc_feature 1..21: note = Synthetic construct
  source 1..21: mol_type = other DNA
cgatacgagcaagacggaaac

SEQ ID NO: 4240 - DNA, 21 bp, synthetic construct
  misc_feature 1..21: note = Synthetic construct
  source 1..21: mol_type = other DNA
gatacgagcaagacggaaacc

SEQ ID NO: 4241 - DNA, 21 bp, synthetic construct
  misc_feature 1..21: note = Synthetic construct
  source 1..21: mol_type = other DNA
atacgagcaagacggaaaccc

SEQ ID NO: 4242 - DNA, 21 bp, synthetic construct
  misc_feature 1..21: note = Synthetic construct
  source 1..21: mol_type = other DNA
tacgagcaagacggaaacccg

SEQ ID NO: 4243 - DNA, 21 bp, synthetic construct
  misc_feature 1..21: note = Synthetic construct
  source 1..21: mol_type = other DNA
acgagcaagacggaaacccga

SEQ ID NO: 4244 - DNA, 21 bp, synthetic construct
  misc_feature 1..21: note = Synthetic construct
  source 1..21: mol_type = other DNA
cgagcaagacggaaacccgag

SEQ ID NO: 4245 - DNA, 21 bp, synthetic construct
  misc_feature 1..21: note = Synthetic construct
  source 1..21: mol_type = other DNA
gagcaagacggaaacccgagg

SEQ ID NO: 4246 - DNA, 21 bp, synthetic construct
  misc_feature 1..21: note = Synthetic construct
  source 1..21: mol_type = other DNA
agcaagacggaaacccgaggt

SEQ ID NO: 4247 - DNA, 21 bp, synthetic construct
  misc_feature 1..21: note = Synthetic construct
  source 1..21: mol_type = other DNA
gcaagacggaaacccgaggta

SEQ ID NO: 4248 - DNA, 21 bp, synthetic construct
  misc_feature 1..21: note = Synthetic construct
  source 1..21: mol_type = other DNA
caagacggaaacccgaggtac

SEQ ID NO: 4249 - DNA, 21 bp, synthetic construct
  misc_feature 1..21: note = Synthetic construct
  source 1..21: mol_type = other DNA
aagacggaaacccgaggtacg

SEQ ID NO: 4250 - DNA, 21 bp, synthetic construct
  misc_feature 1..21: note = Synthetic construct
  source 1..21: mol_type = other DNA
agacggaaacccgaggtacgg

SEQ ID NO: 4251 - DNA, 21 bp, synthetic construct
  misc_feature 1..21: note = Synthetic construct
  source 1..21: mol_type = other DNA
gacggaaacccgaggtacggg

SEQ ID NO: 4252 - DNA, 21 bp, synthetic construct
  misc_feature 1..21: note = Synthetic construct
  source 1..21: mol_type = other DNA
acggaaacccgaggtacgggt

SEQ ID NO: 4253 - DNA, 21 bp, synthetic construct
  misc_feature 1..21: note = Synthetic construct
  source 1..21: mol_type = other DNA
cggaaacccgaggtacgggta

SEQ ID NO: 4254 - DNA, 21 bp, synthetic construct
  misc_feature 1..21: note = Synthetic construct
  source 1..21: mol_type = other DNA
ggaaacccgaggtacgggtat

SEQ ID NO: 4255 - DNA, 21 bp, synthetic construct
  misc_feature 1..21: note = Synthetic construct
  source 1..21: mol_type = other DNA
gaaacccgaggtacgggtatc

SEQ ID NO: 4256 - DNA, 21 bp, synthetic construct
  misc_feature 1..21: note = Synthetic construct
  source 1..21: mol_type = other DNA
aaacccgaggtacgggtatcc

SEQ ID NO: 4257 - DNA, 21 bp, synthetic construct
  misc_feature 1..21: note = Synthetic construct
  source 1..21: mol_type = other DNA
aacccgaggtacgggtatccg

SEQ ID NO: 4258 - DNA, 21 bp, synthetic construct
  misc_feature 1..21: note = Synthetic construct
  source 1..21: mol_type = other DNA
acccgaggtacgggtatccgc

SEQ ID NO: 4259 - DNA, 21 bp, synthetic construct
  misc_feature 1..21: note = Synthetic construct
  source 1..21: mol_type = other DNA
cccgaggtacgggtatccgcg

SEQ ID NO: 4260 - DNA, 21 bp, synthetic construct
  misc_feature 1..21: note = Synthetic construct
  source 1..21: mol_type = other DNA
ccgaggtacgggtatccgcga

SEQ ID NO: 4261 - DNA, 21 bp, synthetic construct
  misc_feature 1..21: note = Synthetic construct
  source 1..21: mol_type = other DNA
cgaggtacgggtatccgcgag

SEQ ID NO: 4262 - DNA, 21 bp, synthetic construct
  misc_feature 1..21: note = Synthetic construct
  source 1..21: mol_type = other DNA
gaggtacgggtatccgcgagc

SEQ ID NO: 4263 - DNA, 21 bp, synthetic construct
  misc_feature 1..21: note = Synthetic construct
  source 1..21: mol_type = other DNA
aggtacgggtatccgcgagca

SEQ ID NO: 4264 - DNA, 21 bp, synthetic construct
  misc_feature 1..21: note = Synthetic construct
  source 1..21: mol_type = other DNA
ggtacgggtatccgcgagcag

SEQ ID NO: 4265 - DNA, 21 bp, synthetic construct
  misc_feature 1..21: note = Synthetic construct
  source 1..21: mol_type = other DNA
gtacgggtatccgcgagcagc

SEQ ID NO: 4266 - DNA, 21 bp, synthetic construct
  misc_feature 1..21: note = Synthetic construct
  source 1..21: mol_type = other DNA
tacgggtatccgcgagcagcc

SEQ ID NO: 4267 - DNA, 21 bp, synthetic construct
  misc_feature 1..21: note = Synthetic construct
  source 1..21: mol_type = other DNA
acgggtatccgcgagcagccg

SEQ ID NO: 4268 - DNA, 21 bp, synthetic construct
  misc_feature 1..21: note = Synthetic construct
  source 1..21: mol_type = other DNA
cgggtatccgcgagcagccgc

SEQ ID NO: 4269 - DNA, 21 bp, synthetic construct
  misc_feature 1..21: note = Synthetic construct
  source 1..21: mol_type = other DNA
gggtatccgcgagcagccgcc

SEQ ID NO: 4270 - DNA, 21 bp, synthetic construct
  misc_feature 1..21: note = Synthetic construct
  source 1..21: mol_type = other DNA
ggtatccgcgagcagccgccc

SEQ ID NO: 4271 - DNA, 21 bp, synthetic construct
  misc_feature 1..21: note = Synthetic construct
  source 1..21: mol_type = other DNA
gtatccgcgagcagccgcccg

SEQ ID NO: 4272 - DNA, 21 bp, synthetic construct
  misc_feature 1..21: note = Synthetic construct
  source 1..21: mol_type = other DNA
tatccgcgagcagccgcccgt

SEQ ID NO: 4273 - DNA, 21 bp, synthetic construct
  misc_feature 1..21: note = Synthetic construct
  source 1..21: mol_type = other DNA
atccgcgagcagccgcccgta

SEQ ID NO: 4274 - DNA, 21 bp, synthetic construct
  misc_feature 1..21: note = Synthetic construct
  source 1..21: mol_type = other DNA
tccgcgagcagccgcccgtac

SEQ ID NO: 4275 - DNA, 21 bp, synthetic construct
  misc_feature 1..21: note = Synthetic construct
  source 1..21: mol_type = other DNA
ccgcgagcagccgcccgtacg

SEQ ID NO: 4276 - DNA, 21 bp, synthetic construct
  misc_feature 1..21: note = Synthetic construct
  source 1..21: mol_type = other DNA
cgcgagcagccgcccgtacgg

SEQ ID NO: 4277 - DNA, 21 bp, synthetic construct
  misc_feature 1..21: note = Synthetic construct
  source 1..21: mol_type = other DNA
gcgagcagccgcccgtacgga

SEQ ID NO: 4278 - DNA, 21 bp, synthetic construct
  misc_feature 1..21: note = Synthetic construct
  source 1..21: mol_type = other DNA
cgagcagccgcccgtacggag

SEQ ID NO: 4279 - DNA, 21 bp, synthetic construct
  misc_feature 1..21: note = Synthetic construct
  source 1..21: mol_type = other DNA
gagcagccgcccgtacggagt

SEQ ID NO: 4280 - DNA, 21 bp, synthetic construct
  misc_feature 1..21: note = Synthetic construct
  source 1..21: mol_type = other DNA
agcagccgcccgtacggagtc

SEQ ID NO: 4281 - DNA, 21 bp, synthetic construct
  misc_feature 1..21: note = Synthetic construct
  source 1..21: mol_type = other DNA
gcagccgcccgtacggagtct

SEQ ID NO: 4282 - DNA, 21 bp, synthetic construct
  misc_feature 1..21: note = Synthetic construct
  source 1..21: mol_type = other DNA
cagccgcccgtacggagtctt

SEQ ID NO: 4283 - DNA, 21 bp, synthetic construct
  misc_feature 1..21: note = Synthetic construct
  source 1..21: mol_type = other DNA
agccgcccgtacggagtcttg

SEQ ID NO: 4284 - DNA, 21 bp, synthetic construct
  misc_feature 1..21: note = Synthetic construct
  source 1..21: mol_type = other DNA
gccgcccgtacggagtcttgg

SEQ ID NO: 4285 - DNA, 21 bp, synthetic construct
  misc_feature 1..21: note = Synthetic construct
  source 1..21: mol_type = other DNA
ccgcccgtacggagtcttggt

SEQ ID NO: 4286 - DNA, 21 bp, synthetic construct
  misc_feature 1..21: note = Synthetic construct
  source 1..21: mol_type = other DNA
cgcccgtacggagtcttggtg

SEQ ID NO: 4287 - DNA, 21 bp, synthetic construct
  misc_feature 1..21: note = Synthetic construct
  source 1..21: mol_type = other DNA
gcccgtacggagtcttggtgt

SEQ ID NO: 4288 - DNA, 21 bp, synthetic construct
  misc_feature 1..21: note = Synthetic construct
  source 1..21: mol_type = other DNA
cccgtacggagtcttggtgta

SEQ ID NO: 4289 - DNA, 21 bp, synthetic construct
  misc_feature 1..21: note = Synthetic construct
  source 1..21: mol_type = other DNA
ccgtacggagtcttggtgtat

SEQ ID NO: 4290 - DNA, 21 bp, synthetic construct
  misc_feature 1..21: note = Synthetic construct
  source 1..21: mol_type = other DNA
cgtacggagtcttggtgtata

SEQ ID NO: 4291 - DNA, 21 bp, synthetic construct
  misc_feature 1..21: note = Synthetic construct
  source 1..21: mol_type = other DNA
gtacggagtcttggtgtatac

SEQ ID NO: 4292 - DNA, 21 bp, synthetic construct
  misc_feature 1..21: note = Synthetic construct
  source 1..21: mol_type = other DNA
tacggagtcttggtgtatacc

SEQ ID NO: 4293 - DNA, 21 bp, synthetic construct
  misc_feature 1..21: note = Synthetic construct
  source 1..21: mol_type = other DNA
acggagtcttggtgtataccg

SEQ ID NO: 4294 - DNA, 21 bp, synthetic construct
  misc_feature 1..21: note = Synthetic construct
  source 1..21: mol_type = other DNA
cggagtcttggtgtataccga

SEQ ID NO: 4295 - DNA, 21 bp, synthetic construct
  misc_feature 1..21: note = Synthetic construct
  source 1..21: mol_type = other DNA
ggagtcttggtgtataccgag

SEQ ID NO: 4296 - DNA, 21 bp, synthetic construct
  misc_feature 1..21: note = Synthetic construct
  source 1..21: mol_type = other DNA
gagtcttggtgtataccgaga

SEQ ID NO: 4297 - DNA, 21 bp, synthetic construct
  misc_feature 1..21: note = Synthetic construct
  source 1..21: mol_type = other DNA
agtcttggtgtataccgagac

SEQ ID NO: 4298 - DNA, 21 bp, synthetic construct
  misc_feature 1..21: note = Synthetic construct
  source 1..21: mol_type = other DNA
gtcttggtgtataccgagact

SEQ ID NO: 4299 - DNA, 21 bp, synthetic construct
  misc_feature 1..21: note = Synthetic construct
  source 1..21: mol_type = other DNA
tcttggtgtataccgagactg

SEQ ID NO: 4300 - DNA, 21 bp, synthetic construct
  misc_feature 1..21: note = Synthetic construct
  source 1..21: mol_type = other DNA
cttggtgtataccgagactgc

SEQ ID NO: 4301 - DNA, 21 bp, synthetic construct
  misc_feature 1..21: note = Synthetic construct
  source 1..21: mol_type = other DNA
ttggtgtataccgagactgcc

SEQ ID NO: 4302 - DNA, 21 bp, synthetic construct
  misc_feature 1..21: note = Synthetic construct
  source 1..21: mol_type = other DNA
tggtgtataccgagactgccg

SEQ ID NO: 4303 - DNA, 21 bp, synthetic construct
  misc_feature 1..21: note = Synthetic construct
  source 1..21: mol_type = other DNA
ggtgtataccgagactgccgt

SEQ ID NO: 4304 - DNA, 21 bp, synthetic construct
  misc_feature 1..21: note = Synthetic construct
  source 1..21: mol_type = other DNA
gtgtataccgagactgccgta

SEQ ID NO: 4305 - DNA, 21 bp, synthetic construct
  misc_feature 1..21: note = Synthetic construct
  source 1..21: mol_type = other DNA
tgtataccgagactgccgtag

SEQ ID NO: 4306 - DNA, 21 bp, synthetic construct
  misc_feature 1..21: note = Synthetic construct
  source 1..21: mol_type = other DNA
gtataccgagactgccgtagg

SEQ ID NO: 4307 - DNA, 21 bp, synthetic construct
  misc_feature 1..21: note = Synthetic construct
  source 1..21: mol_type = other DNA
tataccgagactgccgtaggc

SEQ ID NO: 4308 - DNA, 21 bp, synthetic construct
  misc_feature 1..21: note = Synthetic construct
  source 1..21: mol_type = other DNA
ataccgagactgccgtaggcg

SEQ ID NO: 4309 - DNA, 21 bp, synthetic construct
  misc_feature 1..21: note = Synthetic construct
  source 1..21: mol_type = other DNA
taccgagactgccgtaggcgg

SEQ ID NO: 4310 - DNA, 21 bp, synthetic construct
  misc_feature 1..21: note = Synthetic construct
  source 1..21: mol_type = other DNA
accgagactgccgtaggcggg

SEQ ID NO: 4311 - DNA, 21 bp, synthetic construct
  misc_feature 1..21: note = Synthetic construct
  source 1..21: mol_type = other DNA
ccgagactgccgtaggcgggc

SEQ ID NO: 4312 - DNA, 21 bp, synthetic construct
  misc_feature 1..21: note = Synthetic construct
  source 1..21: mol_type = other DNA
cgagactgccgtaggcgggct

SEQ ID NO: 4313 - DNA, 21 bp, synthetic construct
  misc_feature 1..21: note = Synthetic construct
  source 1..21: mol_type = other DNA
gagactgccgtaggcgggctg

SEQ ID NO: 4314 - DNA, 21 bp, synthetic construct
  misc_feature 1..21: note = Synthetic construct
  source 1..21: mol_type = other DNA
agactgccgtaggcgggctga

SEQ ID NO: 4315 - DNA, 21 bp, synthetic construct
  misc_feature 1..21: note = Synthetic construct
  source 1..21: mol_type = other DNA
gactgccgtaggcgggctgac

SEQ ID NO: 4316 - DNA, 21 bp, synthetic construct
  misc_feature 1..21: note = Synthetic construct
  source 1..21: mol_type = other DNA
actgccgtaggcgggctgact

SEQ ID NO: 4317 - DNA, 21 bp, synthetic construct
  misc_feature 1..21: note = Synthetic construct
  source 1..21: mol_type = other DNA
ctgccgtaggcgggctgacta

SEQ ID NO: 4318 - DNA, 21 bp, synthetic construct
  misc_feature 1..21: note = Synthetic construct
  source 1..21: mol_type = other DNA
tgccgtaggcgggctgactac

SEQ ID NO: 4319 - DNA, 21 bp, synthetic construct
  misc_feature 1..21: note = Synthetic construct
  source 1..21: mol_type = other DNA
gccgtaggcgggctgactacg

SEQ ID NO: 4320 - DNA, 21 bp, synthetic construct
  misc_feature 1..21: note = Synthetic construct
  source 1..21: mol_type = other DNA
ccgtaggcgggctgactacgt

SEQ ID NO: 4321 - DNA, 21 bp, synthetic construct
  misc_feature 1..21: note = Synthetic construct
  source 1..21: mol_type = other DNA
cgtaggcgggctgactacgta

SEQ ID NO: 4322 - DNA, 21 bp, synthetic construct
  misc_feature 1..21: note = Synthetic construct
  source 1..21: mol_type = other DNA
gtaggcgggctgactacgtag

SEQ ID NO: 4323 - DNA, 21 bp, synthetic construct
  misc_feature 1..21: note = Synthetic construct
  source 1..21: mol_type = other DNA
taggcgggctgactacgtagt

SEQ ID NO: 4324 - DNA, 21 bp, synthetic construct
  misc_feature 1..21: note = Synthetic construct
  source 1..21: mol_type = other DNA
aggcgggctgactacgtagta

SEQ ID NO: 4325 - DNA, 21 bp, synthetic construct
  misc_feature 1..21: note = Synthetic construct
  source 1..21: mol_type = other DNA
ggcgggctgactacgtagtag

SEQ ID NO: 4326 - DNA, 21 bp, synthetic construct
  misc_feature 1..21: note = Synthetic construct
  source 1..21: mol_type = other DNA
gcgggctgactacgtagtagt

SEQ ID NO: 4327 - DNA, 21 bp, synthetic construct
  misc_feature 1..21: note = Synthetic construct
  source 1..21: mol_type = other DNA
cgggctgactacgtagtagtc

SEQ ID NO: 4328 - DNA, 21 bp, synthetic construct
  misc_feature 1..21: note = Synthetic construct
  source 1..21: mol_type = other DNA
gggctgactacgtagtagtcg

SEQ ID NO: 4329 - DNA, 21 bp, synthetic construct
  misc_feature 1..21: note = Synthetic construct
  source 1..21: mol_type = other DNA
ggctgactacgtagtagtcgg

SEQ ID NO: 4330 - DNA, 21 bp, synthetic construct
  misc_feature 1..21: note = Synthetic construct
  source 1..21: mol_type = other DNA
gctgactacgtagtagtcggc

SEQ ID NO: 4331 - DNA, 21 bp, synthetic construct
  misc_feature 1..21: note = Synthetic construct
  source 1..21: mol_type = other DNA
ctgactacgtagtagtcggca

SEQ ID NO: 4332 - DNA, 21 bp, synthetic construct
  misc_feature 1..21: note = Synthetic construct
  source 1..21: mol_type = other DNA
tgactacgtagtagtcggcag

SEQ ID NO: 4333 - DNA, 21 bp, synthetic construct
  misc_feature 1..21: note = Synthetic construct
  source 1..21: mol_type = other DNA
gactacgtagtagtcggcagc

SEQ ID NO: 4334 - DNA, 21 bp, synthetic construct
  misc_feature 1..21: note = Synthetic construct
  source 1..21: mol_type = other DNA
actacgtagtagtcggcagcg

SEQ ID NO: 4335 - DNA, 21 bp, synthetic construct
  misc_feature 1..21: note = Synthetic construct
  source 1..21: mol_type = other DNA
ctacgtagtagtcggcagcga

SEQ ID NO: 4336 - DNA, 21 bp, synthetic construct
  misc_feature 1..21: note = Synthetic construct
  source 1..21: mol_type = other DNA
tacgtagtagtcggcagcgag

SEQ ID NO: 4337 - DNA, 21 bp, synthetic construct
  misc_feature 1..21: note = Synthetic construct
  source 1..21: mol_type = other DNA
acgtagtagtcggcagcgagg

SEQ ID NO: 4338 - DNA, 21 bp, synthetic construct
  misc_feature 1..21: note = Synthetic construct
  source 1..21: mol_type = other DNA
cgtagtagtcggcagcgaggt

SEQ ID NO: 4339 - DNA, 21 bp, synthetic construct
  misc_feature 1..21: note = Synthetic construct
  source 1..21: mol_type = other DNA
gtagtagtcggcagcgaggtc

SEQ ID NO: 4340 - DNA, 21 bp, synthetic construct
  misc_feature 1..21: note = Synthetic construct
  source 1..21: mol_type = other DNA
tagtagtcggcagcgaggtcc

SEQ ID NO: 4341 - DNA, 21 bp, synthetic construct
  misc_feature 1..21: note = Synthetic construct
  source 1..21: mol_type = other DNA
agtagtcggcagcgaggtccg

SEQ ID NO: 4342 - DNA, 21 bp, synthetic construct
  misc_feature 1..21: note = Synthetic construct
  source 1..21: mol_type = other DNA
gtagtcggcagcgaggtccgt

SEQ ID NO: 4343 - DNA, 21 bp, synthetic construct
  misc_feature 1..21: note = Synthetic construct
  source 1..21: mol_type = other DNA
tagtcggcagcgaggtccgtc

SEQ ID NO: 4344 - DNA, 21 bp, synthetic construct
  misc_feature 1..21: note = Synthetic construct
  source 1..21: mol_type = other DNA
agtcggcagcgaggtccgtcc

SEQ ID NO: 4345 - DNA, 21 bp, synthetic construct
  misc_feature 1..21: note = Synthetic construct
  source 1..21: mol_type = other DNA
gtcggcagcgaggtccgtccc

SEQ ID NO: 4346 - DNA, 21 bp, synthetic construct
  misc_feature 1..21: note = Synthetic construct
  source 1..21: mol_type = other DNA
tcggcagcgaggtccgtccca

SEQ ID NO: 4347 - DNA, 21 bp, synthetic construct
  misc_feature 1..21: note = Synthetic construct
  source 1..21: mol_type = other DNA
cggcagcgaggtccgtcccac

SEQ ID NO: 4348 - DNA, 21 bp, synthetic construct
  misc_feature 1..21: note = Synthetic construct
  source 1..21: mol_type = other DNA
ggcagcgaggtccgtcccacc

SEQ ID NO: 4349 - DNA, 21 bp, synthetic construct
  misc_feature 1..21: note = Synthetic construct
  source 1..21: mol_type = other DNA
gcagcgaggtccgtcccaccg

SEQ ID NO: 4350 - DNA, 21 bp, synthetic construct
  misc_feature 1..21: note = Synthetic construct
  source 1..21: mol_type = other DNA
cagcgaggtccgtcccaccga

SEQ ID NO: 4351 - DNA, 21 bp, synthetic construct
  misc_feature 1..21: note = Synthetic construct
  source 1..21: mol_type = other DNA
agcgaggtccgtcccaccgaa

SEQ ID NO: 4352 - DNA, 21 bp, synthetic construct
  misc_feature 1..21: note = Synthetic construct
  source 1..21: mol_type = other DNA
gcgaggtccgtcccaccgaag

SEQ ID NO: 4353 - DNA, 21 bp, synthetic construct
  misc_feature 1..21: note = Synthetic construct
  source 1..21: mol_type = other DNA
cgaggtccgtcccaccgaaga

SEQ ID NO: 4354 - DNA, 21 bp, synthetic construct
  misc_feature 1..21: note = Synthetic construct
  source 1..21: mol_type = other DNA
gaggtccgtcccaccgaagaa

SEQ ID NO: 4355 - DNA, 21 bp, synthetic construct
  misc_feature 1..21: note = Synthetic construct
  source 1..21: mol_type = other DNA
aggtccgtcccaccgaagaac

SEQ ID NO: 4356 - DNA, 21 bp, synthetic construct
  misc_feature 1..21: note = Synthetic construct
  source 1..21: mol_type = other DNA
ggtccgtcccaccgaagaaca

SEQ ID NO: 4357 - DNA, 21 bp, synthetic construct
  misc_feature 1..21: note = Synthetic construct
  source 1..21: mol_type = other DNA
gtccgtcccaccgaagaacat

SEQ ID NO: 4358 - DNA, 21 bp, synthetic construct
  misc_feature 1..21: note = Synthetic construct
  source 1..21: mol_type = other DNA
tccgtcccaccgaagaacatc

SEQ ID NO: 4359 - DNA, 21 bp, synthetic construct
  misc_feature 1..21: note = Synthetic construct
  source 1..21: mol_type = other DNA
ccgtcccaccgaagaacatcg

SEQ ID NO: 4360 - DNA, 21 bp, synthetic construct
  misc_feature 1..21: note = Synthetic construct
  source 1..21: mol_type = other DNA
cgtcccaccgaagaacatcga

SEQ ID NO: 4361 - DNA, 21 bp, synthetic construct
  misc_feature 1..21: note = Synthetic construct
  source 1..21: mol_type = other DNA
gtcccaccgaagaacatcgaa

SEQ ID NO: 4362 - DNA, 21 bp, synthetic construct
  misc_feature 1..21: note = Synthetic construct
  source 1..21: mol_type = other DNA
tcccaccgaagaacatcgaag

SEQ ID NO: 4363 - DNA, 21 bp, synthetic construct
  misc_feature 1..21: note = Synthetic construct
  source 1..21: mol_type = other DNA
cccaccgaagaacatcgaagg

SEQ ID NO: 4364 - DNA, 21 bp, synthetic construct
  misc_feature 1..21: note = Synthetic construct
  source 1..21: mol_type = other DNA
ccaccgaagaacatcgaaggc

SEQ ID NO: 4365 - DNA, 21 bp, synthetic construct
  misc_feature 1..21: note = Synthetic construct
  source 1..21: mol_type = other DNA
caccgaagaacatcgaaggca

SEQ ID NO: 4366 - DNA, 21 bp, synthetic construct
  misc_feature 1..21: note = Synthetic construct
  source 1..21: mol_type = other DNA
accgaagaacatcgaaggcac

SEQ ID NO: 4367 - DNA, 21 bp, synthetic construct
  misc_feature 1..21: note = Synthetic construct
  source 1..21: mol_type = other DNA
ccgaagaacatcgaaggcacc

SEQ ID NO: 4368 - DNA, 21 bp, synthetic construct
  misc_feature 1..21: note = Synthetic construct
  source 1..21: mol_type = other DNA
cgaagaacatcgaaggcacct

SEQ ID NO: 4369 - DNA, 21 bp, synthetic construct
  misc_feature 1..21: note = Synthetic construct
  source 1..21: mol_type = other DNA
gaagaacatcgaaggcacctg

SEQ ID NO: 4370 - DNA, 21 bp, synthetic construct
  misc_feature 1..21: note = Synthetic construct
  source 1..21: mol_type = other DNA
aagaacatcgaaggcacctgg

SEQ ID NO: 4371 - DNA, 21 bp, synthetic construct
  misc_feature 1..21: note = Synthetic construct
  source 1..21: mol_type = other DNA
agaacatcgaaggcacctggg

SEQ ID NO: 4372 - DNA, 21 bp, synthetic construct
  misc_feature 1..21: note = Synthetic construct
  source 1..21: mol_type = other DNA
gaacatcgaaggcacctggga

SEQ ID NO: 4373 - DNA, 21 bp, synthetic construct
  misc_feature 1..21: note = Synthetic construct
  source 1..21: mol_type = other DNA
aacatcgaaggcacctgggag

SEQ ID NO: 4374 - DNA, 21 bp, synthetic construct
  misc_feature 1..21: note = Synthetic construct
  source 1..21: mol_type = other DNA
acatcgaaggcacctgggagg

SEQ ID NO: 4375 - DNA, 21 bp, synthetic construct
  misc_feature 1..21: note = Synthetic construct
  source 1..21: mol_type = other DNA
catcgaaggcacctgggagga

SEQ ID NO: 4376 - DNA, 21 bp, synthetic construct
  misc_feature 1..21: note = Synthetic construct
  source 1..21: mol_type = other DNA
atcgaaggcacctgggaggag

SEQ ID NO: 4377 - DNA, 21 bp, synthetic construct
  misc_feature 1..21: note = Synthetic construct
  source 1..21: mol_type = other DNA
tcgaaggcacctgggaggaga

SEQ ID NO: 4378 - DNA, 21 bp, synthetic construct
  misc_feature 1..21: note = Synthetic construct
  source 1..21: mol_type = other DNA
cgaaggcacctgggaggagag

SEQ ID NO: 4379 - DNA, 21 bp, synthetic construct
  misc_feature 1..21: note = Synthetic construct
  source 1..21: mol_type = other DNA
gaaggcacctgggaggagagc

SEQ ID NO: 4380 - DNA, 21 bp, synthetic construct
  misc_feature 1..21: note = Synthetic construct
  source 1..21: mol_type = other DNA
aaggcacctgggaggagagcc

SEQ ID NO: 4381 - DNA, 21 bp, synthetic construct
  misc_feature 1..21: note = Synthetic construct
  source 1..21: mol_type = other DNA
aggcacctgggaggagagccg

SEQ ID NO: 4382 - DNA, 21 bp, synthetic construct
  misc_feature 1..21: note = Synthetic construct
  source 1..21: mol_type = other DNA
ggcacctgggaggagagccgt

SEQ ID NO: 4383 - DNA, 21 bp, synthetic construct
  misc_feature 1..21: note = Synthetic construct
  source 1..21: mol_type = other DNA
gcacctgggaggagagccgta

SEQ ID NO: 4384 - DNA, 21 bp, synthetic construct
  misc_feature 1..21: note = Synthetic construct
  source 1..21: mol_type = other DNA
cacctgggaggagagccgtac

SEQ ID NO: 4385 - DNA, 21 bp, synthetic construct
  misc_feature 1..21: note = Synthetic construct
  source 1..21: mol_type = other DNA
acctgggaggagagccgtacc

SEQ ID NO: 4386 - DNA, 21 bp, synthetic construct
  misc_feature 1..21: note = Synthetic construct
  source 1..21: mol_type = other DNA
cctgggaggagagccgtaccc

SEQ ID NO: 4387 - DNA, 21 bp, synthetic construct
  misc_feature 1..21: note = Synthetic construct
  source 1..21: mol_type = other DNA
ctgggaggagagccgtaccca

SEQ ID NO: 4388 - DNA, 21 bp, synthetic construct
  misc_feature 1..21: note = Synthetic construct
  source 1..21: mol_type = other DNA
tgggaggagagccgtacccac

SEQ ID NO: 4389 - DNA, 21 bp, synthetic construct
  misc_feature 1..21: note = Synthetic construct
  source 1..21: mol_type = other DNA
gggaggagagccgtacccaca

SEQ ID NO: 4390 - DNA, 21 bp, synthetic construct
  misc_feature 1..21: note = Synthetic construct
  source 1..21: mol_type = other DNA
ggaggagagccgtacccacac

SEQ ID NO: 4391 - DNA, 21 bp, synthetic construct
  misc_feature 1..21: note = Synthetic construct
  source 1..21: mol_type = other DNA
gaggagagccgtacccacacc

SEQ ID NO: 4392 - DNA, 21 bp, synthetic construct
  misc_feature 1..21: note = Synthetic construct
  source 1..21: mol_type = other DNA
aggagagccgtacccacacct

SEQ ID NO: 4393 - DNA, 21 bp, synthetic construct
  misc_feature 1..21: note = Synthetic construct
  source 1..21: mol_type = other DNA
ggagagccgtacccacacctt

SEQ ID NO: 4394 - DNA, 21 bp, synthetic construct
  misc_feature 1..21: note = Synthetic construct
  source 1..21: mol_type = other DNA
gagagccgtacccacacctta

SEQ ID NO: 4395 - DNA, 21 bp, synthetic construct
  misc_feature 1..21: note = Synthetic construct
  source 1..21: mol_type = other DNA
agagccgtacccacaccttat

SEQ ID NO: 4396 - DNA, 21 bp, synthetic construct
  misc_feature 1..21: note = Synthetic construct
  source 1..21: mol_type = other DNA
gagccgtacccacaccttata

SEQ ID NO: 4397 - DNA, 21 bp, synthetic construct
  misc_feature 1..21: note = Synthetic construct
  source 1..21: mol_type = other DNA
agccgtacccacaccttatag

SEQ ID NO: 4398 - DNA, 21 bp, synthetic construct
  misc_feature 1..21: note = Synthetic construct
  source 1..21: mol_type = other DNA
gccgtacccacaccttataga

SEQ ID NO: 4399 - DNA, 21 bp, synthetic construct
  misc_feature 1..21: note = Synthetic construct
  source 1..21: mol_type = other DNA
ccgtacccacaccttatagag

SEQ ID NO: 4400 - DNA, 21 bp, synthetic construct
  misc_feature 1..21: note = Synthetic construct
  source 1..21: mol_type = other DNA
cgtacccacaccttatagagg

SEQ ID NO: 4401 - DNA, 21 bp, synthetic construct
  misc_feature 1..21: note = Synthetic construct
  source 1..21: mol_type = other DNA
gtacccacaccttatagaggc

SEQ ID NO: 4402 - DNA, 21 bp, synthetic construct
  misc_feature 1..21: note = Synthetic construct
  source 1..21: mol_type = other DNA
tacccacaccttatagaggcg

SEQ ID NO: 4403 - DNA, 21 bp, synthetic construct
  misc_feature 1..21: note = Synthetic construct
  source 1..21: mol_type = other DNA
acccacaccttatagaggcgt

SEQ ID NO: 4404 - DNA, 21 bp, synthetic construct
  misc_feature 1..21: note = Synthetic construct
  source 1..21: mol_type = other DNA
cccacaccttatagaggcgtg

SEQ ID NO: 4405 - DNA, 21 bp, synthetic construct
  misc_feature 1..21: note = Synthetic construct
  source 1..21: mol_type = other DNA
ccacaccttatagaggcgtgg

SEQ ID NO: 4406 - DNA, 21 bp, synthetic construct
  misc_feature 1..21: note = Synthetic construct
  source 1..21: mol_type = other DNA
cacaccttatagaggcgtgga

SEQ ID NO: 4407 - DNA, 21 bp, synthetic construct
  misc_feature 1..21: note = Synthetic construct
  source 1..21: mol_type = other DNA
acaccttatagaggcgtggat

SEQ ID NO: 4408 - DNA, 21 bp, synthetic construct
  misc_feature 1..21: note = Synthetic construct
  source 1..21: mol_type = other DNA
caccttatagaggcgtggatc

SEQ ID NO: 4409 - DNA, 21 bp, synthetic construct
  misc_feature 1..21: note = Synthetic construct
  source 1..21: mol_type = other DNA
accttatagaggcgtggatct

SEQ ID NO: 4410 - DNA, 21 bp, synthetic construct
  misc_feature 1..21: note = Synthetic construct
  source 1..21: mol_type = other DNA
ccttatagaggcgtggatctg

SEQ ID NO: 4411 - DNA, 21 bp, synthetic construct
  misc_feature 1..21: note = Synthetic construct
  source 1..21: mol_type = other DNA
cttatagaggcgtggatctga

SEQ ID NO: 4412 - DNA, 21 bp, synthetic construct
  misc_feature 1..21: note = Synthetic construct
  source 1..21: mol_type = other DNA
ttatagaggcgtggatctgac

SEQ ID NO: 4413 - DNA, 21 bp, synthetic construct
  misc_feature 1..21: note = Synthetic construct
  source 1..21: mol_type = other DNA
tatagaggcgtggatctgaca

SEQ ID NO: 4414 - DNA, 21 bp, synthetic construct
  misc_feature 1..21: note = Synthetic construct
  source 1..21: mol_type = other DNA
atagaggcgtggatctgacat

SEQ ID NO: 4415 - DNA, 21 bp, synthetic construct
  misc_feature 1..21: note = Synthetic construct
  source 1..21: mol_type = other DNA
tagaggcgtggatctgacata

SEQ ID NO: 4416 - DNA, 21 bp, synthetic construct
  misc_feature 1..21: note = Synthetic construct
  source 1..21: mol_type = other DNA
agaggcgtggatctgacatac

SEQ ID NO: 4417 - DNA, 21 bp, synthetic construct
  misc_feature 1..21: note = Synthetic construct
  source 1..21: mol_type = other DNA
gaggcgtggatctgacatacc

SEQ ID NO: 4418 - DNA, 21 bp, synthetic construct
  misc_feature 1..21: note = Synthetic construct
  source 1..21: mol_type = other DNA
aggcgtggatctgacatacct

SEQ ID NO: 4419 - DNA, 21 bp, synthetic construct
  misc_feature 1..21: note = Synthetic construct
  source 1..21: mol_type = other DNA
ggcgtggatctgacatacctc

SEQ ID NO: 4420 - DNA, 21 bp, synthetic construct
  misc_feature 1..21: note = Synthetic construct
  source 1..21: mol_type = other DNA
gcgtggatctgacatacctcc

SEQ ID NO: 4421 - DNA, 21 bp, synthetic construct
  misc_feature 1..21: note = Synthetic construct
  source 1..21: mol_type = other DNA
cgtggatctgacatacctccg

SEQ ID NO: 4422 - DNA, 21 bp, synthetic construct
  misc_feature 1..21: note = Synthetic construct
  source 1..21: mol_type = other DNA
gtggatctgacatacctccga

SEQ ID NO: 4423 - DNA, 21 bp, synthetic construct
  misc_feature 1..21: note = Synthetic construct
  source 1..21: mol_type = other DNA
tggatctgacatacctccgac

SEQ ID NO: 4424 - DNA, 21 bp, synthetic construct
  misc_feature 1..21: note = Synthetic construct
  source 1..21: mol_type = other DNA
ggatctgacatacctccgaca

SEQ ID NO: 4425 - DNA, 21 bp, synthetic construct
  misc_feature 1..21: note = Synthetic construct
  source 1..21: mol_type = other DNA
gatctgacatacctccgacaa

SEQ ID NO: 4426 - DNA, 21 bp, synthetic construct
  misc_feature 1..21: note = Synthetic construct
  source 1..21: mol_type = other DNA
atctgacatacctccgacaac

SEQ ID NO: 4427 - DNA, 21 bp, synthetic construct
  misc_feature 1..21: note = Synthetic construct
  source 1..21: mol_type = other DNA
tctgacatacctccgacaact

SEQ ID NO: 4428 - DNA, 21 bp, synthetic construct
  misc_feature 1..21: note = Synthetic construct
  source 1..21: mol_type = other DNA
ctgacatacctccgacaactc

SEQ ID NO: 4429 - DNA, 21 bp, synthetic construct
  misc_feature 1..21: note = Synthetic construct
  source 1..21: mol_type = other DNA
tgacatacctccgacaactcc

SEQ ID NO: 4430 - DNA, 21 bp, synthetic construct
  misc_feature 1..21: note = Synthetic construct
  source 1..21: mol_type = other DNA
gacatacctccgacaactccc

SEQ ID NO: 4431 - DNA, 21 bp, synthetic construct
  misc_feature 1..21: note = Synthetic construct
  source 1..21: mol_type = other DNA
acatacctccgacaactcccc

SEQ ID NO: 4432 - DNA, 21 bp, synthetic construct
  misc_feature 1..21: note = Synthetic construct
  source 1..21: mol_type = other DNA
catacctccgacaactcccca

SEQ ID NO: 4433 - DNA, 21 bp, synthetic construct
  misc_feature 1..21: note = Synthetic construct
  source 1..21: mol_type = other DNA
atacctccgacaactccccaa

SEQ ID NO: 4434 - DNA, 21 bp, synthetic construct
  misc_feature 1..21: note = Synthetic construct
  source 1..21: mol_type = other DNA
tacctccgacaactccccaac

SEQ ID NO: 4435 - DNA, 21 bp, synthetic construct
  misc_feature 1..21: note = Synthetic construct
  source 1..21: mol_type = other DNA
acctccgacaactccccaacc

SEQ ID NO: 4436 - DNA, 21 bp, synthetic construct
  misc_feature 1..21: note = Synthetic construct
  source 1..21: mol_type = other DNA
cctccgacaactccccaaccc

SEQ ID NO: 4437 - DNA, 21 bp, synthetic construct
  misc_feature 1..21: note = Synthetic construct
  source 1..21: mol_type = other DNA
ctccgacaactccccaacccc

SEQ ID NO: 4438 - DNA, 21 bp, synthetic construct
  misc_feature 1..21: note = Synthetic construct
  source 1..21: mol_type = other DNA
tccgacaactccccaaccccg

SEQ ID NO: 4439 - DNA, 21 bp, synthetic construct
  misc_feature 1..21: note = Synthetic construct
  source 1..21: mol_type = other DNA
ccgacaactccccaaccccgt

SEQ ID NO: 4440 - DNA, 21 bp, synthetic construct
  misc_feature 1..21: note = Synthetic construct
  source 1..21: mol_type = other DNA
cgacaactccccaaccccgta

SEQ ID NO: 4441 - DNA, 21 bp, synthetic construct
  misc_feature 1..21: note = Synthetic construct
  source 1..21: mol_type = other DNA
gacaactccccaaccccgtag

SEQ ID NO: 4442 - DNA, 21 bp, synthetic construct
  misc_feature 1..21: note = Synthetic construct
  source 1..21: mol_type = other DNA
acaactccccaaccccgtagc

SEQ ID NO: 4443 - DNA, 21 bp, synthetic construct
  misc_feature 1..21: note = Synthetic construct
  source 1..21: mol_type = other DNA
caactccccaaccccgtagcc

SEQ ID NO: 4444 - DNA, 21 bp, synthetic construct
  misc_feature 1..21: note = Synthetic construct
  source 1..21: mol_type = other DNA
aactccccaaccccgtagccg

SEQ ID NO: 4445 - DNA, 21 bp, synthetic construct
  misc_feature 1..21: note = Synthetic construct
  source 1..21: mol_type = other DNA
actccccaaccccgtagccga

SEQ ID NO: 4446 - DNA, 21 bp, synthetic construct
  misc_feature 1..21: note = Synthetic construct
  source 1..21: mol_type = other DNA
ctccccaaccccgtagccgat

SEQ ID NO: 4447 - DNA, 21 bp, synthetic construct
  misc_feature 1..21: note = Synthetic construct
  source 1..21: mol_type = other DNA
tccccaaccccgtagccgatt

SEQ ID NO: 4448 - DNA, 21 bp, synthetic construct
  misc_feature 1..21: note = Synthetic construct
  source 1..21: mol_type = other DNA
ccccaaccccgtagccgattt

SEQ ID NO: 4449 - DNA, 21 bp, synthetic construct
  misc_feature 1..21: note = Synthetic construct
  source 1..21: mol_type = other DNA
cccaaccccgtagccgattta

SEQ ID NO: 4450 - DNA, 21 bp, synthetic construct
  misc_feature 1..21: note = Synthetic construct
  source 1..21: mol_type = other DNA
ccaaccccgtagccgatttaa

SEQ ID NO: 4451 - DNA, 21 bp, synthetic construct
  misc_feature 1..21: note = Synthetic construct
  source 1..21: mol_type = other DNA
caaccccgtagccgatttaat

SEQ ID NO: 4452 - DNA, 21 bp, synthetic construct
  misc_feature 1..21: note = Synthetic construct
  source 1..21: mol_type = other DNA
aaccccgtagccgatttaata

SEQ ID NO: 4453 - DNA, 21 bp, synthetic construct
  misc_feature 1..21: note = Synthetic construct
  source 1..21: mol_type = other DNA
accccgtagccgatttaatat

SEQ ID NO: 4454 - DNA, 21 bp, synthetic construct
  misc_feature 1..21: note = Synthetic construct
  source 1..21: mol_type = other DNA
ccccgtagccgatttaatatc

SEQ ID NO: 4455 - DNA, 21 bp, synthetic construct
  misc_feature 1..21: note = Synthetic construct
  source 1..21: mol_type = other DNA
cccgtagccgatttaatatca

SEQ ID NO: 4456 - DNA, 21 bp, synthetic construct
  misc_feature 1..21: note = Synthetic construct
  source 1..21: mol_type = other DNA
ccgtagccgatttaatatcag

SEQ ID NO: 4457 - DNA, 21 bp, synthetic construct
  misc_feature 1..21: note = Synthetic construct
  source 1..21: mol_type = other DNA
cgtagccgatttaatatcagc

SEQ ID NO: 4458 - DNA, 21 bp, synthetic construct
  misc_feature 1..21: note = Synthetic construct
  source 1..21: mol_type = other DNA
gtagccgatttaatatcagca

SEQ ID NO: 4459 - DNA, 21 bp, synthetic construct
  misc_feature 1..21: note = Synthetic construct
  source 1..21: mol_type = other DNA
tagccgatttaatatcagcat

SEQ ID NO: 4460 - DNA, 21 bp, synthetic construct
  misc_feature 1..21: note = Synthetic construct
  source 1..21: mol_type = other DNA
agccgatttaatatcagcatc

SEQ ID NO: 4461 - DNA, 21 bp, synthetic construct
  misc_feature 1..21: note = Synthetic construct
  source 1..21: mol_type = other DNA
gccgatttaatatcagcatca

SEQ ID NO: 4462 - DNA, 21 bp, synthetic construct
  misc_feature 1..21: note = Synthetic construct
  source 1..21: mol_type = other DNA
ccgatttaatatcagcatcag

SEQ ID NO: 4463 - DNA, 21 bp, synthetic construct
  misc_feature 1..21: note = Synthetic construct
  source 1..21: mol_type = other DNA
cgatttaatatcagcatcagg

SEQ ID NO: 4464 - DNA, 21 bp, synthetic construct
  misc_feature 1..21: note = Synthetic construct
  source 1..21: mol_type = other DNA
gatttaatatcagcatcaggg

SEQ ID NO: 4465 - DNA, 21 bp, synthetic construct
  misc_feature 1..21: note = Synthetic construct
  source 1..21: mol_type = other DNA
atttaatatcagcatcagggc

SEQ ID NO: 4466 - DNA, 21 bp, synthetic construct
  misc_feature 1..21: note = Synthetic construct
  source 1..21: mol_type = other DNA
tttaatatcagcatcagggcg

SEQ ID NO: 4467 - DNA, 21 bp, synthetic construct
  misc_feature 1..21: note = Synthetic construct
  source 1..21: mol_type = other DNA
ttaatatcagcatcagggcga

SEQ ID NO: 4468 - DNA, 21 bp, synthetic construct
  misc_feature 1..21: note = Synthetic construct
  source 1..21: mol_type = other DNA
taatatcagcatcagggcgaa

SEQ ID NO: 4469 - DNA, 21 bp, synthetic construct
  misc_feature 1..21: note = Synthetic construct
  source 1..21: mol_type = other DNA
aatatcagcatcagggcgaag

SEQ ID NO: 4470 - DNA, 21 bp, synthetic construct
  misc_feature 1..21: note = Synthetic construct
  source 1..21: mol_type = other DNA
atatcagcatcagggcgaaga

SEQ ID NO: 4471 - DNA, 21 bp, synthetic construct
  misc_feature 1..21: note = Synthetic construct
  source 1..21: mol_type = other DNA
tatcagcatcagggcgaagag

SEQ ID NO: 4472 - DNA, 21 bp, synthetic construct
  misc_feature 1..21: note = Synthetic construct
  source 1..21: mol_type = other DNA
atcagcatcagggcgaagaga

SEQ ID NO: 4473 - DNA, 21 bp, synthetic construct
  misc_feature 1..21: note = Synthetic construct
  source 1..21: mol_type = other DNA
tcagcatcagggcgaagagat

SEQ ID NO: 4474 - DNA, 21 bp, synthetic construct
  misc_feature 1..21: note = Synthetic construct
  source 1..21: mol_type = other DNA
cagcatcagggcgaagagatt

SEQ ID NO: 4475 - DNA, 21 bp, synthetic construct
  misc_feature 1..21: note = Synthetic construct
  source 1..21: mol_type = other DNA
agcatcagggcgaagagattg

SEQ ID NO: 4476 - DNA, 21 bp, synthetic construct
  misc_feature 1..21: note = Synthetic construct
  source 1..21: mol_type = other DNA
gcatcagggcgaagagattgt

SEQ ID NO: 4477 - DNA, 21 bp, synthetic construct
  misc_feature 1..21: note = Synthetic construct
  source 1..21: mol_type = other DNA
catcagggcgaagagattgtc

SEQ ID NO: 4478 - DNA, 21 bp, synthetic construct
  misc_feature 1..21: note = Synthetic construct
  source 1..21: mol_type = other DNA
atcagggcgaagagattgtca

SEQ ID NO: 4479 - DNA, 21 bp, synthetic construct
  misc_feature 1..21: note = Synthetic construct
  source 1..21: mol_type = other DNA
tcagggcgaagagattgtcaa

SEQ ID NO: 4480 - DNA, 21 bp, synthetic construct
  misc_feature 1..21: note = Synthetic construct
  source 1..21: mol_type = other DNA
cagggcgaagagattgtcaac

SEQ ID NO: 4481 - DNA, 21 bp, synthetic construct
  misc_feature 1..21: note = Synthetic construct
  source 1..21: mol_type = other DNA
agggcgaagagattgtcaaca

SEQ ID NO: 4482 - DNA, 21 bp, synthetic construct
  misc_feature 1..21: note = Synthetic construct
  source 1..21: mol_type = other DNA
gggcgaagagattgtcaacag

SEQ ID NO: 4483 - DNA, 21 bp, synthetic construct
  misc_feature 1..21: note = Synthetic construct
  source 1..21: mol_type = other DNA
ggcgaagagattgtcaacagg

SEQ ID NO: 4484 - DNA, 21 bp, synthetic construct
  misc_feature 1..21: note = Synthetic construct
  source 1..21: mol_type = other DNA
gcgaagagattgtcaacaggt

SEQ ID NO: 4485 - DNA, 21 bp, synthetic construct
  misc_feature 1..21: note = Synthetic construct
  source 1..21: mol_type = other DNA
cgaagagattgtcaacaggtt

SEQ ID NO: 4486 - DNA, 21 bp, synthetic construct
  misc_feature 1..21: note = Synthetic construct
  source 1..21: mol_type = other DNA
gaagagattgtcaacaggttt

SEQ ID NO: 4487 - DNA, 21 bp, synthetic construct
  misc_feature 1..21: note = Synthetic construct
  source 1..21: mol_type = other DNA
aagagattgtcaacaggtttc

SEQ ID NO: 4488 - DNA, 21 bp, synthetic construct
  misc_feature 1..21: note = Synthetic construct
  source 1..21: mol_type = other DNA
agagattgtcaacaggtttct

SEQ ID NO: 4489 - DNA, 21 bp, synthetic construct
  misc_feature 1..21: note = Synthetic construct
  source 1..21: mol_type = other DNA
gagattgtcaacaggtttctt

SEQ ID NO: 4490 - DNA, 21 bp, synthetic construct
  misc_feature 1..21: note = Synthetic construct
  source 1..21: mol_type = other DNA
agattgtcaacaggtttcttg

SEQ ID NO: 4491 - DNA, 21 bp, synthetic construct
  misc_feature 1..21: note = Synthetic construct
  source 1..21: mol_type = other DNA
gattgtcaacaggtttcttga

SEQ ID NO: 4492 - DNA, 21 bp, synthetic construct
  misc_feature 1..21: note = Synthetic construct
  source 1..21: mol_type = other DNA
attgtcaacaggtttcttgat

SEQ ID NO: 4493 - DNA, 21 bp, synthetic construct
  misc_feature 1..21: note = Synthetic construct
  source 1..21: mol_type = other DNA
ttgtcaacaggtttcttgatg

SEQ ID NO: 4494 - DNA, 21 bp, synthetic construct
  misc_feature 1..21: note = Synthetic construct
  source 1..21: mol_type = other DNA
tgtcaacaggtttcttgatgt

SEQ ID NO: 4495 - DNA, 21 bp, synthetic construct
  misc_feature 1..21: note = Synthetic construct
  source 1..21: mol_type = other DNA
gtcaacaggtttcttgatgta

SEQ ID NO: 4496 - DNA, 21 bp, synthetic construct
  misc_feature 1..21: note = Synthetic construct
  source 1..21: mol_type = other DNA
tcaacaggtttcttgatgtaa

SEQ ID NO: 4497 - DNA, 21 bp, synthetic construct
  misc_feature 1..21: note = Synthetic construct
  source 1..21: mol_type = other DNA
caacaggtttcttgatgtaaa

SEQ ID NO: 4498 - DNA, 21 bp, synthetic construct
  misc_feature 1..21: note = Synthetic construct
  source 1..21: mol_type = other DNA
aacaggtttcttgatgtaaaa

SEQ ID NO: 4499 - DNA, 21 bp, synthetic construct
  misc_feature 1..21: note = Synthetic construct
  source 1..21: mol_type = other DNA
acaggtttcttgatgtaaaac

SEQ ID NO: 4500 - DNA, 21 bp, synthetic construct
  misc_feature 1..21: note = Synthetic construct
  source 1..21: mol_type = other DNA
caggtttcttgatgtaaaacg

SEQ ID NO: 4501 - DNA, 21 bp, synthetic construct
  misc_feature 1..21: note = Synthetic construct
  source 1..21: mol_type = other DNA
aggtttcttgatgtaaaacgg

SEQ ID NO: 4502 - DNA, 21 bp, synthetic construct
  misc_feature 1..21: note = Synthetic construct
  source 1..21: mol_type = other DNA
ggtttcttgatgtaaaacggt

SEQ ID NO: 4503 - DNA, 21 bp, synthetic construct
  misc_feature 1..21: note = Synthetic construct
  source 1..21: mol_type = other DNA
gtttcttgatgtaaaacggtt

SEQ ID NO: 4504 - DNA, 21 bp, synthetic construct
  misc_feature 1..21: note = Synthetic construct
  source 1..21: mol_type = other DNA
tttcttgatgtaaaacggttt

SEQ ID NO: 4505 - DNA, 21 bp, synthetic construct
  misc_feature 1..21: note = Synthetic construct
  source 1..21: mol_type = other DNA
ttcttgatgtaaaacggtttg

SEQ ID NO: 4506 - DNA, 21 bp, synthetic construct
  misc_feature 1..21: note = Synthetic construct
  source 1..21: mol_type = other DNA
tcttgatgtaaaacggtttga

SEQ ID NO: 4507 - DNA, 21 bp, synthetic construct
  misc_feature 1..21: note = Synthetic construct
  source 1..21: mol_type = other DNA
cttgatgtaaaacggtttgac

SEQ ID NO: 4508 - DNA, 21 bp, synthetic construct
  misc_feature 1..21: note = Synthetic construct
  source 1..21: mol_type = other DNA
ttgatgtaaaacggtttgaca

SEQ ID NO: 4509 - DNA, 21 bp, synthetic construct
  misc_feature 1..21: note = Synthetic construct
  source 1..21: mol_type = other DNA
tgatgtaaaacggtttgacat

SEQ ID NO: 4510 - DNA, 21 bp, synthetic construct
  misc_feature 1..21: note = Synthetic construct
  source 1..21: mol_type = other DNA
gatgtaaaacggtttgacatc

SEQ ID NO: 4511 - DNA, 21 bp, synthetic construct
  misc_feature 1..21: note = Synthetic construct
  source 1..21: mol_type = other DNA
atgtaaaacggtttgacatcg

SEQ ID NO: 4512 - DNA, 21 bp, synthetic construct
  misc_feature 1..21: note = Synthetic construct
  source 1..21: mol_type = other DNA
tgtaaaacggtttgacatcga

SEQ ID NO: 4513 - DNA, 21 bp, synthetic construct
  misc_feature 1..21: note = Synthetic construct
  source 1..21: mol_type = other DNA
gtaaaacggtttgacatcgac

SEQ ID NO: 4514 - DNA, 21 bp, synthetic construct
  misc_feature 1..21: note = Synthetic construct
  source 1..21: mol_type = other DNA
taaaacggtttgacatcgaca

SEQ ID NO: 4515 - DNA, 21 bp, synthetic construct
  misc_feature 1..21: note = Synthetic construct
  source 1..21: mol_type = other DNA
aaaacggtttgacatcgacac

SEQ ID NO: 4516 - DNA, 21 bp, synthetic construct
  misc_feature 1..21: note = Synthetic construct
  source 1..21: mol_type = other DNA
aaacggtttgacatcgacacc

SEQ ID NO: 4517 - DNA, 21 bp, synthetic construct
  misc_feature 1..21: note = Synthetic construct
  source 1..21: mol_type = other DNA
aacggtttgacatcgacacca

SEQ ID NO: 4518 - DNA, 21 bp, synthetic construct
  misc_feature 1..21: note = Synthetic construct
  source 1..21: mol_type = other DNA
acggtttgacatcgacaccac

SEQ ID NO: 4519 - DNA, 21 bp, synthetic construct
  misc_feature 1..21: note = Synthetic construct
  source 1..21: mol_type = other DNA
cggtttgacatcgacaccacg

SEQ ID NO: 4520 - DNA, 21 bp, synthetic construct
  misc_feature 1..21: note = Synthetic construct
  source 1..21: mol_type = other DNA
ggtttgacatcgacaccacgg

SEQ ID NO: 4521 - DNA, 21 bp, synthetic construct
  misc_feature 1..21: note = Synthetic construct
  source 1..21: mol_type = other DNA
gtttgacatcgacaccacggt

SEQ ID NO: 4522 - DNA, 21 bp, synthetic construct
  misc_feature 1..21: note = Synthetic construct
  source 1..21: mol_type = other DNA
tttgacatcgacaccacggta

SEQ ID NO: 4523 - DNA, 21 bp, synthetic construct
  misc_feature 1..21: note = Synthetic construct
  source 1..21: mol_type = other DNA
ttgacatcgacaccacggtaa

SEQ ID NO: 4524 - DNA, 21 bp, synthetic construct
  misc_feature 1..21: note = Synthetic construct
  source 1..21: mol_type = other DNA
tgacatcgacaccacggtaaa

SEQ ID NO: 4525 - DNA, 21 bp, synthetic construct
  misc_feature 1..21: note = Synthetic construct
  source 1..21: mol_type = other DNA
gacatcgacaccacggtaaaa

SEQ ID NO: 4526 - DNA, 21 bp, synthetic construct
  misc_feature 1..21: note = Synthetic construct
  source 1..21: mol_type = other DNA
acatcgacaccacggtaaaag

SEQ ID NO: 4527 - DNA, 21 bp, synthetic construct
  misc_feature 1..21: note = Synthetic construct
  source 1..21: mol_type = other DNA
catcgacaccacggtaaaagt

SEQ ID NO: 4528 - DNA, 21 bp, synthetic construct
  misc_feature 1..21: note = Synthetic construct
  source 1..21: mol_type = other DNA
atcgacaccacggtaaaagtg

SEQ ID NO: 4529 - DNA, 21 bp, synthetic construct
  misc_feature 1..21: note = Synthetic construct
  source 1..21: mol_type = other DNA
tcgacaccacggtaaaagtgc

SEQ ID NO: 4530 - DNA, 21 bp, synthetic construct
  misc_feature 1..21: note = Synthetic construct
  source 1..21: mol_type = other DNA
cgacaccacggtaaaagtgcg

SEQ ID NO: 4531 - DNA, 21 bp, synthetic construct
  misc_feature 1..21: note = Synthetic construct
  source 1..21: mol_type = other DNA
gacaccacggtaaaagtgcgc

SEQ ID NO: 4532 - DNA, 21 bp, synthetic construct
  misc_feature 1..21: note = Synthetic construct
  source 1..21: mol_type = other DNA
acaccacggtaaaagtgcgcg

SEQ ID NO: 4533 - DNA, 21 bp, synthetic construct
  misc_feature 1..21: note = Synthetic construct
  source 1..21: mol_type = other DNA
caccacggtaaaagtgcgcgc

SEQ ID NO: 4534 - DNA, 21 bp, synthetic construct
  misc_feature 1..21: note = Synthetic construct
  source 1..21: mol_type = other DNA
accacggtaaaagtgcgcgcc

SEQ ID NO: 4535 - DNA, 21 bp, synthetic construct
  misc_feature 1..21: note = Synthetic construct
  source 1..21: mol_type = other DNA
ccacggtaaaagtgcgcgccg

SEQ ID NO: 4536 - DNA, 21 bp, synthetic construct
  misc_feature 1..21: note = Synthetic construct
  source 1..21: mol_type = other DNA
cacggtaaaagtgcgcgccgc

SEQ ID NO: 4537 - DNA, 21 bp, synthetic construct
  misc_feature 1..21: note = Synthetic construct
  source 1..21: mol_type = other DNA
acggtaaaagtgcgcgccgca

SEQ ID NO: 4538 - DNA, 21 bp, synthetic construct
  misc_feature 1..21: note = Synthetic construct
  source 1..21: mol_type = other DNA
cggtaaaagtgcgcgccgcag

SEQ ID NO: 4539 - DNA, 21 bp, synthetic construct
  misc_feature 1..21: note = Synthetic construct
  source 1..21: mol_type = other DNA
ggtaaaagtgcgcgccgcagc

SEQ ID NO: 4540 - DNA, 21 bp, synthetic construct
  misc_feature 1..21: note = Synthetic construct
  source 1..21: mol_type = other DNA
gtaaaagtgcgcgccgcagct

SEQ ID NO: 4541 - DNA, 21 bp, synthetic construct
  misc_feature 1..21: note = Synthetic construct
  source 1..21: mol_type = other DNA
taaaagtgcgcgccgcagctc

SEQ ID NO: 4542 - DNA, 21 bp, synthetic construct
  misc_feature 1..21: note = Synthetic construct
  source 1..21: mol_type = other DNA
aaaagtgcgcgccgcagctct

SEQ ID NO: 4543 - DNA, 21 bp, synthetic construct
  misc_feature 1..21: note = Synthetic construct
  source 1..21: mol_type = other DNA
aaagtgcgcgccgcagctctc

SEQ ID NO: 4544 - DNA, 21 bp, synthetic construct
  misc_feature 1..21: note = Synthetic construct
  source 1..21: mol_type = other DNA
aagtgcgcgccgcagctctcg

SEQ ID NO: 4545 - DNA, 21 bp, synthetic construct
  misc_feature 1..21: note = Synthetic construct
  source 1..21: mol_type = other DNA
agtgcgcgccgcagctctcgc

SEQ ID NO: 4546 - DNA, 21 bp, synthetic construct
  misc_feature 1..21: note = Synthetic construct
  source 1..21: mol_type = other DNA
gtgcgcgccgcagctctcgcg

SEQ ID NO: 4547 - DNA, 21 bp, synthetic construct
  misc_feature 1..21: note = Synthetic construct
  source 1..21: mol_type = other DNA
tgcgcgccgcagctctcgcga

SEQ ID NO: 4548 - DNA, 21 bp, synthetic construct
  misc_feature 1..21: note = Synthetic construct
  source 1..21: mol_type = other DNA
gcgcgccgcagctctcgcgaa

SEQ ID NO: 4549 - DNA, 21 bp, synthetic construct
  misc_feature 1..21: note = Synthetic construct
  source 1..21: mol_type = other DNA
cgcgccgcagctctcgcgaaa

SEQ ID NO: 4550 - DNA, 21 bp, synthetic construct
  misc_feature 1..21: note = Synthetic construct
  source 1..21: mol_type = other DNA
gcgccgcagctctcgcgaaag

SEQ ID NO: 4551 - DNA, 21 bp, synthetic construct
  misc_feature 1..21: note = Synthetic construct
  source 1..21: mol_type = other DNA
cgccgcagctctcgcgaaaga

SEQ ID NO: 4552 - DNA, 21 bp, synthetic construct
  misc_feature 1..21: note = Synthetic construct
  source 1..21: mol_type = other DNA
gccgcagctctcgcgaaagag

SEQ ID NO: 4553 - DNA, 21 bp, synthetic construct
  misc_feature 1..21: note = Synthetic construct
  source 1..21: mol_type = other DNA
ccgcagctctcgcgaaagagc

SEQ ID NO: 4554 - DNA, 21 bp, synthetic construct
  misc_feature 1..21: note = Synthetic construct
  source 1..21: mol_type = other DNA
cgcagctctcgcgaaagagcc

SEQ ID NO: 4555 - DNA, 21 bp, synthetic construct
  misc_feature 1..21: note = Synthetic construct
  source 1..21: mol_type = other DNA
gcagctctcgcgaaagagccc

SEQ ID NO: 4556 - DNA, 21 bp, synthetic construct
  misc_feature 1..21: note = Synthetic construct
  source 1..21: mol_type = other DNA
cagctctcgcgaaagagcccg

SEQ ID NO: 4557 - DNA, 21 bp, synthetic construct
  misc_feature 1..21: note = Synthetic construct
  source 1..21: mol_type = other DNA
agctctcgcgaaagagcccgg

SEQ ID NO: 4558 - DNA, 21 bp, synthetic construct
  misc_feature 1..21: note = Synthetic construct
  source 1..21: mol_type = other DNA
gctctcgcgaaagagcccgga

SEQ ID NO: 4559 - DNA, 21 bp, synthetic construct
  misc_feature 1..21: note = Synthetic construct
  source 1..21: mol_type = other DNA
ctctcgcgaaagagcccggac

SEQ ID NO: 4560 - DNA, 21 bp, synthetic construct
  misc_feature 1..21: note = Synthetic construct
  source 1..21: mol_type = other DNA
tctcgcgaaagagcccggaca

SEQ ID NO: 4561 - DNA, 21 bp, synthetic construct
  misc_feature 1..21: note = Synthetic construct
  source 1..21: mol_type = other DNA
ctcgcgaaagagcccggacac

SEQ ID NO: 4562 - DNA, 21 bp, synthetic construct
  misc_feature 1..21: note = Synthetic construct
  source 1..21: mol_type = other DNA
tcgcgaaagagcccggacacg

SEQ ID NO: 4563 - DNA, 21 bp, synthetic construct
  misc_feature 1..21: note = Synthetic construct
  source 1..21: mol_type = other DNA
cgcgaaagagcccggacacga

SEQ ID NO: 4564 - DNA, 21 bp, synthetic construct
  misc_feature 1..21: note = Synthetic construct
  source 1..21: mol_type = other DNA
gcgaaagagcccggacacgaa

SEQ ID NO: 4565 - DNA, 21 bp, synthetic construct
  misc_feature 1..21: note = Synthetic construct
  source 1..21: mol_type = other DNA
cgaaagagcccggacacgaac

SEQ ID NO: 4566 - DNA, 21 bp, synthetic construct
  misc_feature 1..21: note = Synthetic construct
  source 1..21: mol_type = other DNA
gaaagagcccggacacgaacg

SEQ ID NO: 4567 - DNA, 21 bp, synthetic construct
  misc_feature 1..21: note = Synthetic construct
  source 1..21: mol_type = other DNA
aaagagcccggacacgaacgt

SEQ ID NO: 4568 - DNA, 21 bp, synthetic construct
  misc_feature 1..21: note = Synthetic construct
  source 1..21: mol_type = other DNA
aagagcccggacacgaacgtt

SEQ ID NO: 4569 - DNA, 21 bp, synthetic construct
  misc_feature 1..21: note = Synthetic construct
  source 1..21: mol_type = other DNA
agagcccggacacgaacgttt

SEQ ID NO: 4570 - DNA, 21 bp, synthetic construct
  misc_feature 1..21: note = Synthetic construct
  source 1..21: mol_type = other DNA
gagcccggacacgaacgtttt

SEQ ID NO: 4571 - DNA, 21 bp, synthetic construct
  misc_feature 1..21: note = Synthetic construct
  source 1..21: mol_type = other DNA
agcccggacacgaacgtttta

SEQ ID NO: 4572 - DNA, 21 bp, synthetic construct
  misc_feature 1..21: note = Synthetic construct
  source 1..21: mol_type = other DNA
gcccggacacgaacgttttac

SEQ ID NO: 4573 - DNA, 21 bp, synthetic construct
  misc_feature 1..21: note = Synthetic construct
  source 1..21: mol_type = other DNA
cccggacacgaacgttttacg

SEQ ID NO: 4574 - DNA, 21 bp, synthetic construct
  misc_feature 1..21: note = Synthetic construct
  source 1..21: mol_type = other DNA
ccggacacgaacgttttacga

SEQ ID NO: 4575 - DNA, 21 bp, synthetic construct
  misc_feature 1..21: note = Synthetic construct
  source 1..21: mol_type = other DNA
cggacacgaacgttttacgaa

SEQ ID NO: 4576 - DNA, 21 bp, synthetic construct
  misc_feature 1..21: note = Synthetic construct
  source 1..21: mol_type = other DNA
ggacacgaacgttttacgaag

SEQ ID NO: 4577 - DNA, 21 bp, synthetic construct
  misc_feature 1..21: note = Synthetic construct
  source 1..21: mol_type = other DNA
gacacgaacgttttacgaaga

SEQ ID NO: 4578 - DNA, 21 bp, synthetic construct
  misc_feature 1..21: note = Synthetic construct
  source 1..21: mol_type = other DNA
acacgaacgttttacgaagat

SEQ ID NO: 4579 - DNA, 21 bp, synthetic construct
  misc_feature 1..21: note = Synthetic construct
  source 1..21: mol_type = other DNA
cacgaacgttttacgaagatt

SEQ ID NO: 4580 - DNA, 21 bp, synthetic construct
  misc_feature 1..21: note = Synthetic construct
  source 1..21: mol_type = other DNA
acgaacgttttacgaagattc

SEQ ID NO: 4581 - DNA, 21 bp, synthetic construct
  misc_feature 1..21: note = Synthetic construct
  source 1..21: mol_type = other DNA
cgaacgttttacgaagattcg

SEQ ID NO: 4582 - DNA, 21 bp, synthetic construct
  misc_feature 1..21: note = Synthetic construct
  source 1..21: mol_type = other DNA
gaacgttttacgaagattcgg

SEQ ID NO: 4583 - DNA, 21 bp, synthetic construct
  misc_feature 1..21: note = Synthetic construct
  source 1..21: mol_type = other DNA
aacgttttacgaagattcggt

SEQ ID NO: 4584 - DNA, 21 bp, synthetic construct
  misc_feature 1..21: note = Synthetic construct
  source 1..21: mol_type = other DNA
acgttttacgaagattcggtt

SEQ ID NO: 4585 - DNA, 21 bp, synthetic construct
  misc_feature 1..21: note = Synthetic construct
  source 1..21: mol_type = other DNA
cgttttacgaagattcggttt

SEQ ID NO: 4586 - DNA, 21 bp, synthetic construct
  misc_feature 1..21: note = Synthetic construct
  source 1..21: mol_type = other DNA
gttttacgaagattcggttta

SEQ ID NO: 4587 - DNA, 21 bp, synthetic construct
  misc_feature 1..21: note = Synthetic construct
  source 1..21: mol_type = other DNA
ttttacgaagattcggtttaa

SEQ ID NO: 4588 - DNA, 21 bp, synthetic construct
  misc_feature 1..21: note = Synthetic construct
  source 1..21: mol_type = other DNA
tttacgaagattcggtttaaa

SEQ ID NO: 4589 - DNA, 21 bp, synthetic construct
  misc_feature 1..21: note = Synthetic construct
  source 1..21: mol_type = other DNA
ttacgaagattcggtttaaaa

SEQ ID NO: 4590 - DNA, 21 bp, synthetic construct
  misc_feature 1..21: note = Synthetic construct
  source 1..21: mol_type = other DNA
tacgaagattcggtttaaaac

SEQ ID NO: 4591 - DNA, 21 bp, synthetic construct
  misc_feature 1..21: note = Synthetic construct
  source 1..21: mol_type = other DNA
acgaagattcggtttaaaacc

SEQ ID NO: 4592 - DNA, 21 bp, synthetic construct
  misc_feature 1..21: note = Synthetic construct
  source 1..21: mol_type = other DNA
cgaagattcggtttaaaaccg

SEQ ID NO: 4593 - DNA, 21 bp, synthetic construct
  misc_feature 1..21: note = Synthetic construct
  source 1..21: mol_type = other DNA
gaagattcggtttaaaaccgt

SEQ ID NO: 4594 - DNA, 21 bp, synthetic construct
  misc_feature 1..21: note = Synthetic construct
  source 1..21: mol_type = other DNA
aagattcggtttaaaaccgta

SEQ ID NO: 4595 - DNA, 21 bp, synthetic construct
  misc_feature 1..21: note = Synthetic construct
  source 1..21: mol_type = other DNA
agattcggtttaaaaccgtag

SEQ ID NO: 4596 - DNA, 21 bp, synthetic construct
  misc_feature 1..21: note = Synthetic construct
  source 1..21: mol_type = other DNA
gattcggtttaaaaccgtagt

SEQ ID NO: 4597 - DNA, 21 bp, synthetic construct
  misc_feature 1..21: note = Synthetic construct
  source 1..21: mol_type = other DNA
attcggtttaaaaccgtagta

SEQ ID NO: 4598 - DNA, 21 bp, synthetic construct
  misc_feature 1..21: note = Synthetic construct
  source 1..21: mol_type = other DNA
ttcggtttaaaaccgtagtag

SEQ ID NO: 4599 - DNA, 21 bp, synthetic construct
  misc_feature 1..21: note = Synthetic construct
  source 1..21: mol_type = other DNA
tcggtttaaaaccgtagtagg

SEQ ID NO: 4600 - DNA, 21 bp, synthetic construct
  misc_feature 1..21: note = Synthetic construct
  source 1..21: mol_type = other DNA
cggtttaaaaccgtagtaggc

SEQ ID NO: 4601 - DNA, 21 bp, synthetic construct
  misc_feature 1..21: note = Synthetic construct
  source 1..21: mol_type = other DNA
ggtttaaaaccgtagtaggca

SEQ ID NO: 4602 - DNA, 21 bp, synthetic construct
  misc_feature 1..21: note = Synthetic construct
  source 1..21: mol_type = other DNA
gtttaaaaccgtagtaggcaa

SEQ ID NO: 4603 - DNA, 21 bp, synthetic construct
  misc_feature 1..21: note = Synthetic construct
  source 1..21: mol_type = other DNA
tttaaaaccgtagtaggcaag

SEQ ID NO: 4604 - DNA, 21 bp, synthetic construct
  misc_feature 1..21: note = Synthetic construct
  source 1..21: mol_type = other DNA
ttaaaaccgtagtaggcaagt

SEQ ID NO: 4605 - DNA, 21 bp, synthetic construct
  misc_feature 1..21: note = Synthetic construct
  source 1..21: mol_type = other DNA
taaaaccgtagtaggcaagtg

SEQ ID NO: 4606 - DNA, 21 bp, synthetic construct
  misc_feature 1..21: note = Synthetic construct
  source 1..21: mol_type = other DNA
aaaaccgtagtaggcaagtgc

SEQ ID NO: 4607 - DNA, 21 bp, synthetic construct
  misc_feature 1..21: note = Synthetic construct
  source 1..21: mol_type = other DNA
aaaccgtagtaggcaagtgcc

SEQ ID NO: 4608 - DNA, 21 bp, synthetic construct
  misc_feature 1..21: note = Synthetic construct
  source 1..21: mol_type = other DNA
aaccgtagtaggcaagtgcct

SEQ ID NO: 4609 - DNA, 21 bp, synthetic construct
  misc_feature 1..21: note = Synthetic construct
  source 1..21: mol_type = other DNA
accgtagtaggcaagtgcctc

SEQ ID NO: 4610 - DNA, 21 bp, synthetic construct
  misc_feature 1..21: note = Synthetic construct
  source 1..21: mol_type = other DNA
ccgtagtaggcaagtgcctct

SEQ ID NO: 4611 - DNA, 21 bp, synthetic construct
  misc_feature 1..21: note = Synthetic construct
  source 1..21: mol_type = other DNA
cgtagtaggcaagtgcctcta

SEQ ID NO: 4612 - DNA, 21 bp, synthetic construct
  misc_feature 1..21: note = Synthetic construct
  source 1..21: mol_type = other DNA
gtagtaggcaagtgcctctag

SEQ ID NO: 4613 - DNA, 21 bp, synthetic construct
  misc_feature 1..21: note = Synthetic construct
  source 1..21: mol_type = other DNA
tagtaggcaagtgcctctagc

SEQ ID NO: 4614 - DNA, 21 bp, synthetic construct
  misc_feature 1..21: note = Synthetic construct
  source 1..21: mol_type = other DNA
agtaggcaagtgcctctagca

SEQ ID NO: 4615 - DNA, 21 bp, synthetic construct
  misc_feature 1..21: note = Synthetic construct
  source 1..21: mol_type = other DNA
gtaggcaagtgcctctagcac

SEQ ID NO: 4616 - DNA, 21 bp, synthetic construct
  misc_feature 1..21: note = Synthetic construct
  source 1..21: mol_type = other DNA
taggcaagtgcctctagcaca

SEQ ID NO: 4617 - DNA, 21 bp, synthetic construct
  misc_feature 1..21: note = Synthetic construct
  source 1..21: mol_type = other DNA
aggcaagtgcctctagcacac

SEQ ID NO: 4618 - DNA, 21 bp, synthetic construct
  misc_feature 1..21: note = Synthetic construct
  source 1..21: mol_type = other DNA
ggcaagtgcctctagcacacg

SEQ ID NO: 4619 - DNA, 21 bp, synthetic construct
  misc_feature 1..21: note = Synthetic construct
  source 1..21: mol_type = other DNA
gcaagtgcctctagcacacgg

SEQ ID NO: 4620 - DNA, 21 bp, synthetic construct
  misc_feature 1..21: note = Synthetic construct
  source 1..21: mol_type = other DNA
caagtgcctctagcacacggg

SEQ ID NO: 4621 - DNA, 21 bp, synthetic construct
  misc_feature 1..21: note = Synthetic construct
  source 1..21: mol_type = other DNA
aagtgcctctagcacacgggg

SEQ ID NO: 4622 - DNA, 21 bp, synthetic construct
  misc_feature 1..21: note = Synthetic construct
  source 1..21: mol_type = other DNA
agtgcctctagcacacggggt

SEQ ID NO: 4623 - DNA, 21 bp, synthetic construct
  misc_feature 1..21: note = Synthetic construct
  source 1..21: mol_type = other DNA
gtgcctctagcacacggggtg

SEQ ID NO: 4624 - DNA, 21 bp, synthetic construct
  misc_feature 1..21: note = Synthetic construct
  source 1..21: mol_type = other DNA
tgcctctagcacacggggtgc

SEQ ID NO: 4625 - DNA, 21 bp, synthetic construct
  misc_feature 1..21: note = Synthetic construct
  source 1..21: mol_type = other DNA
gcctctagcacacggggtgca

SEQ ID NO: 4626 - DNA, 21 bp, synthetic construct
  misc_feature 1..21: note = Synthetic construct
  source 1..21: mol_type = other DNA
cctctagcacacggggtgcaa

SEQ ID NO: 4627 - DNA, 21 bp, synthetic construct
  misc_feature 1..21: note = Synthetic construct
  source 1..21: mol_type = other DNA
ctctagcacacggggtgcaat

SEQ ID NO: 4628 - DNA, 21 bp, synthetic construct
  misc_feature 1..21: note = Synthetic construct
  source 1..21: mol_type = other DNA
tctagcacacggggtgcaatc

SEQ ID NO: 4629 - DNA, 21 bp, synthetic construct
  misc_feature 1..21: note = Synthetic construct
  source 1..21: mol_type = other DNA
ctagcacacggggtgcaatct

SEQ ID NO: 4630 - DNA, 21 bp, synthetic construct
  misc_feature 1..21: note = Synthetic construct
  source 1..21: mol_type = other DNA
tagcacacggggtgcaatctc

SEQ ID NO: 4631 - DNA, 21 bp, synthetic construct
  misc_feature 1..21: note = Synthetic construct
  source 1..21: mol_type = other DNA
agcacacggggtgcaatctca

SEQ ID NO: 4632 - DNA, 21 bp, synthetic construct
  misc_feature 1..21: note = Synthetic construct
  source 1..21: mol_type = other DNA
gcacacggggtgcaatctcac

SEQ ID NO: 4633 - DNA, 21 bp, synthetic construct
  misc_feature 1..21: note = Synthetic construct
  source 1..21: mol_type = other DNA
cacacggggtgcaatctcact

SEQ ID NO: 4634 - DNA, 21 bp, synthetic construct
  misc_feature 1..21: note = Synthetic construct
  source 1..21: mol_type = other DNA
acacggggtgcaatctcactg

SEQ ID NO: 4635 - DNA, 21 bp, synthetic construct
  misc_feature 1..21: note = Synthetic construct
  source 1..21: mol_type = other DNA
cacggggtgcaatctcactgg

SEQ ID NO: 4636 - DNA, 21 bp, synthetic construct
  misc_feature 1..21: note = Synthetic construct
  source 1..21: mol_type = other DNA
acggggtgcaatctcactggg

SEQ ID NO: 4637 - DNA, 21 bp, synthetic construct
  misc_feature 1..21: note = Synthetic construct
  source 1..21: mol_type = other DNA
cggggtgcaatctcactggga

SEQ ID NO: 4638 - DNA, 21 bp, synthetic construct
  misc_feature 1..21: note = Synthetic construct
  source 1..21: mol_type = other DNA
ggggtgcaatctcactgggac

SEQ ID NO: 4639 - DNA, 21 bp, synthetic construct
  misc_feature 1..21: note = Synthetic construct
  source 1..21: mol_type = other DNA
gggtgcaatctcactgggaca

SEQ ID NO: 4640 - DNA, 21 bp, synthetic construct
  misc_feature 1..21: note = Synthetic construct
  source 1..21: mol_type = other DNA
ggtgcaatctcactgggacat

SEQ ID NO: 4641 - DNA, 21 bp, synthetic construct
  misc_feature 1..21: note = Synthetic construct
  source 1..21: mol_type = other DNA
gtgcaatctcactgggacata

SEQ ID NO: 4642 - DNA, 21 bp, synthetic construct
  misc_feature 1..21: note = Synthetic construct
  source 1..21: mol_type = other DNA
tgcaatctcactgggacatat

SEQ ID NO: 4643 - DNA, 21 bp, synthetic construct
  misc_feature 1..21: note = Synthetic construct
  source 1..21: mol_type = other DNA
gcaatctcactgggacatata

SEQ ID NO: 4644 - DNA, 21 bp, synthetic construct
  misc_feature 1..21: note = Synthetic construct
  source 1..21: mol_type = other DNA
caatctcactgggacatataa

SEQ ID NO: 4645 - DNA, 21 bp, synthetic construct
  misc_feature 1..21: note = Synthetic construct
  source 1..21: mol_type = other DNA
aatctcactgggacatataat

SEQ ID NO: 4646 - DNA, 21 bp, synthetic construct
  misc_feature 1..21: note = Synthetic construct
  source 1..21: mol_type = other DNA
atctcactgggacatataata

SEQ ID NO: 4647 - DNA, 21 bp, synthetic construct
  misc_feature 1..21: note = Synthetic construct
  source 1..21: mol_type = other DNA
tctcactgggacatataatat

SEQ ID NO: 4648 - DNA, 21 bp, synthetic construct
  misc_feature 1..21: note = Synthetic construct
  source 1..21: mol_type = other DNA
ctcactgggacatataatatc

SEQ ID NO: 4649 - DNA, 21 bp, synthetic construct
  misc_feature 1..21: note = Synthetic construct
  source 1..21: mol_type = other DNA
tcactgggacatataatatcg

SEQ ID NO: 4650 - DNA, 21 bp, synthetic construct
  misc_feature 1..21: note = Synthetic construct
  source 1..21: mol_type = other DNA
cactgggacatataatatcgt

SEQ ID NO: 4651 - DNA, 21 bp, synthetic construct
  misc_feature 1..21: note = Synthetic construct
  source 1..21: mol_type = other DNA
actgggacatataatatcgtc

SEQ ID NO: 4652 - DNA, 21 bp, synthetic construct
  misc_feature 1..21: note = Synthetic construct
  source 1..21: mol_type = other DNA
ctgggacatataatatcgtcc

SEQ ID NO: 4653 - DNA, 21 bp, synthetic construct
  misc_feature 1..21: note = Synthetic construct
  source 1..21: mol_type = other DNA
tgggacatataatatcgtccc

SEQ ID NO: 4654 - DNA, 21 bp, synthetic construct
  misc_feature 1..21: note = Synthetic construct
  source 1..21: mol_type = other DNA
gggacatataatatcgtcccc

SEQ ID NO: 4655 - DNA, 21 bp, synthetic construct
  misc_feature 1..21: note = Synthetic construct
  source 1..21: mol_type = other DNA
ggacatataatatcgtccccg

SEQ ID NO: 4656 - DNA, 21 bp, synthetic construct
  misc_feature 1..21: note = Synthetic construct
  source 1..21: mol_type = other DNA
gacatataatatcgtccccgt

SEQ ID NO: 4657 - DNA, 21 bp, synthetic construct
  misc_feature 1..21: note = Synthetic construct
  source 1..21: mol_type = other DNA
acatataatatcgtccccgta

SEQ ID NO: 4658 - DNA, 21 bp, synthetic construct
  misc_feature 1..21: note = Synthetic construct
  source 1..21: mol_type = other DNA
catataatatcgtccccgtag

SEQ ID NO: 4659 - DNA, 21 bp, synthetic construct
  misc_feature 1..21: note = Synthetic construct
  source 1..21: mol_type = other DNA
atataatatcgtccccgtaga

SEQ ID NO: 4660 - DNA, 21 bp, synthetic construct
  misc_feature 1..21: note = Synthetic construct
  source 1..21: mol_type = other DNA
tataatatcgtccccgtagat

SEQ ID NO: 4661 - DNA, 21 bp, synthetic construct
  misc_feature 1..21: note = Synthetic construct
  source 1..21: mol_type = other DNA
ataatatcgtccccgtagatg

SEQ ID NO: 4662 - DNA, 21 bp, synthetic construct
  misc_feature 1..21: note = Synthetic construct
  source 1..21: mol_type = other DNA
taatatcgtccccgtagatgc

SEQ ID NO: 4663 - DNA, 21 bp, synthetic construct
  misc_feature 1..21: note = Synthetic construct
  source 1..21: mol_type = other DNA
aatatcgtccccgtagatgcc

SEQ ID NO: 4664 - DNA, 21 bp, synthetic construct
  misc_feature 1..21: note = Synthetic construct
  source 1..21: mol_type = other DNA
atatcgtccccgtagatgcct

SEQ ID NO: 4665 - DNA, 21 bp, synthetic construct
  misc_feature 1..21: note = Synthetic construct
  source 1..21: mol_type = other DNA
tatcgtccccgtagatgccta

SEQ ID NO: 4666 - DNA, 21 bp, synthetic construct
  misc_feature 1..21: note = Synthetic construct
  source 1..21: mol_type = other DNA
atcgtccccgtagatgcctat

SEQ ID NO: 4667 - DNA, 21 bp, synthetic construct
  misc_feature 1..21: note = Synthetic construct
  source 1..21: mol_type = other DNA
tcgtccccgtagatgcctatg

SEQ ID NO: 4668 - DNA, 21 bp, synthetic construct
  misc_feature 1..21: note = Synthetic construct
  source 1..21: mol_type = other DNA
cgtccccgtagatgcctatgg

SEQ ID NO: 4669 - DNA, 21 bp, synthetic construct
  misc_feature 1..21: note = Synthetic construct
  source 1..21: mol_type = other DNA
gtccccgtagatgcctatggt

SEQ ID NO: 4670 - DNA, 21 bp, synthetic construct
  misc_feature 1..21: note = Synthetic construct
  source 1..21: mol_type = other DNA
tccccgtagatgcctatggtt

SEQ ID NO: 4671 - DNA, 21 bp, synthetic construct
  misc_feature 1..21: note = Synthetic construct
  source 1..21: mol_type = other DNA
ccccgtagatgcctatggttc

SEQ ID NO: 4672 - DNA, 21 bp, synthetic construct
  misc_feature 1..21: note = Synthetic construct
  source 1..21: mol_type = other DNA
cccgtagatgcctatggttcc

SEQ ID NO: 4673 - DNA, 21 bp, synthetic construct
  misc_feature 1..21: note = Synthetic construct
  source 1..21: mol_type = other DNA
ccgtagatgcctatggttccg

SEQ ID NO: 4674 - DNA, 21 bp, synthetic construct
  misc_feature 1..21: note = Synthetic construct
  source 1..21: mol_type = other DNA
cgtagatgcctatggttccgg

SEQ ID NO: 4675 - DNA, 21 bp, synthetic construct
  misc_feature 1..21: note = Synthetic construct
  source 1..21: mol_type = other DNA
gtagatgcctatggttccggc

SEQ ID NO: 4676 - DNA, 21 bp, synthetic construct
  misc_feature 1..21: note = Synthetic construct
  source 1..21: mol_type = other DNA
tagatgcctatggttccggcg

SEQ ID NO: 4677 - DNA, 21 bp, synthetic construct
  misc_feature 1..21: note = Synthetic construct
  source 1..21: mol_type = other DNA
agatgcctatggttccggcgt

SEQ ID NO: 4678 - DNA, 21 bp, synthetic construct
  misc_feature 1..21: note = Synthetic construct
  source 1..21: mol_type = other DNA
gatgcctatggttccggcgtt

SEQ ID NO: 4679 - DNA, 21 bp, synthetic construct
  misc_feature 1..21: note = Synthetic construct
  source 1..21: mol_type = other DNA
atgcctatggttccggcgtta

SEQ ID NO: 4680 - DNA, 21 bp, synthetic construct
  misc_feature 1..21: note = Synthetic construct
  source 1..21: mol_type = other DNA
tgcctatggttccggcgttac

SEQ ID NO: 4681 - DNA, 21 bp, synthetic construct
  misc_feature 1..21: note = Synthetic construct
  source 1..21: mol_type = other DNA
gcctatggttccggcgttacc

SEQ ID NO: 4682 - DNA, 21 bp, synthetic construct
  misc_feature 1..21: note = Synthetic construct
  source 1..21: mol_type = other DNA
cctatggttccggcgttacca

SEQ ID NO: 4683 - DNA, 21 bp, synthetic construct
  misc_feature 1..21: note = Synthetic construct
  source 1..21: mol_type = other DNA
ctatggttccggcgttaccaa

SEQ ID NO: 4684 - DNA, 21 bp, synthetic construct
  misc_feature 1..21: note = Synthetic construct
  source 1..21: mol_type = other DNA
tatggttccggcgttaccaaa

SEQ ID NO: 4685 - DNA, 21 bp, synthetic construct
  misc_feature 1..21: note = Synthetic construct
  source 1..21: mol_type = other DNA
atggttccggcgttaccaaaa

SEQ ID NO: 4686 - DNA, 21 bp, synthetic construct
  misc_feature 1..21: note = Synthetic construct
  source 1..21: mol_type = other DNA
tggttccggcgttaccaaaat

SEQ ID NO: 4687 - DNA, 21 bp, synthetic construct
  misc_feature 1..21: note = Synthetic construct
  source 1..21: mol_type = other DNA
ggttccggcgttaccaaaatg

SEQ ID NO: 4688 - DNA, 21 bp, synthetic construct
  misc_feature 1..21: note = Synthetic construct
  source 1..21: mol_type = other DNA
gttccggcgttaccaaaatgg

SEQ ID NO: 4689 - DNA, 21 bp, synthetic construct
  misc_feature 1..21: note = Synthetic construct
  source 1..21: mol_type = other DNA
ttccggcgttaccaaaatgga

SEQ ID NO: 4690 - DNA, 21 bp, synthetic construct
  misc_feature 1..21: note = Synthetic construct
  source 1..21: mol_type = other DNA
tccggcgttaccaaaatggat

SEQ ID NO: 4691 - DNA, 21 bp, synthetic construct
  misc_feature 1..21: note = Synthetic construct
  source 1..21: mol_type = other DNA
ccggcgttaccaaaatggatt

SEQ ID NO: 4692 - DNA, 21 bp, synthetic construct
  misc_feature 1..21: note = Synthetic construct
  source 1..21: mol_type = other DNA
cggcgttaccaaaatggattt

SEQ ID NO: 4693 - DNA, 21 bp, synthetic construct
  misc_feature 1..21: note = Synthetic construct
  source 1..21: mol_type = other DNA
ggcgttaccaaaatggatttg

SEQ ID NO: 4694 - DNA, 21 bp, synthetic construct
  misc_feature 1..21: note = Synthetic construct
  source 1..21: mol_type = other DNA
gcgttaccaaaatggatttgg

SEQ ID NO: 4695 - DNA, 21 bp, synthetic construct
  misc_feature 1..21: note = Synthetic construct
  source 1..21: mol_type = other DNA
cgttaccaaaatggatttggg

SEQ ID NO: 4696 - DNA, 21 bp, synthetic construct
  misc_feature 1..21: note = Synthetic construct
  source 1..21: mol_type = other DNA
gttaccaaaatggatttgggt

SEQ ID NO: 4697 - DNA, 21 bp, synthetic construct
  misc_feature 1..21: note = Synthetic construct
  source 1..21: mol_type = other DNA
ttaccaaaatggatttgggtc

SEQ ID NO: 4698 - DNA, 21 bp, synthetic construct
  misc_feature 1..21: note = Synthetic construct
  source 1..21: mol_type = other DNA
taccaaaatggatttgggtcg

SEQ ID NO: 4699 - DNA, 21 bp, synthetic construct
  misc_feature 1..21: note = Synthetic construct
  source 1..21: mol_type = other DNA
accaaaatggatttgggtcgc

SEQ ID NO: 4700 - DNA, 21 bp, synthetic construct
  misc_feature 1..21: note = Synthetic construct
  source 1..21: mol_type = other DNA
ccaaaatggatttgggtcgct

SEQ ID NO: 4701 - DNA, 21 bp, synthetic construct
  misc_feature 1..21: note = Synthetic construct
  source 1..21: mol_type = other DNA
caaaatggatttgggtcgctt

SEQ ID NO: 4702 - DNA, 21 bp, synthetic construct
  misc_feature 1..21: note = Synthetic construct
  source 1..21: mol_type = other DNA
aaaatggatttgggtcgcttt

SEQ ID NO: 4703 - DNA, 21 bp, synthetic construct
  misc_feature 1..21: note = Synthetic construct
  source 1..21: mol_type = other DNA
aaatggatttgggtcgctttg

SEQ ID NO: 4704 - DNA, 21 bp, synthetic construct
  misc_feature 1..21: note = Synthetic construct
  source 1..21: mol_type = other DNA
aatggatttgggtcgctttga

SEQ ID NO: 4705 - DNA, 21 bp, synthetic construct
  misc_feature 1..21: note = Synthetic construct
  source 1..21: mol_type = other DNA
atggatttgggtcgctttgac

SEQ ID NO: 4706 - DNA, 21 bp, synthetic construct
  misc_feature 1..21: note = Synthetic construct
  source 1..21: mol_type = other DNA
tggatttgggtcgctttgact

SEQ ID NO: 4707 - DNA, 21 bp, synthetic construct
  misc_feature 1..21: note = Synthetic construct
  source 1..21: mol_type = other DNA
ggatttgggtcgctttgacta

SEQ ID NO: 4708 - DNA, 21 bp, synthetic construct
  misc_feature 1..21: note = Synthetic construct
  source 1..21: mol_type = other DNA
gatttgggtcgctttgactat

SEQ ID NO: 4709 - DNA, 21 bp, synthetic construct
  misc_feature 1..21: note = Synthetic construct
  source 1..21: mol_type = other DNA
atttgggtcgctttgactatt

SEQ ID NO: 4710 - DNA, 21 bp, synthetic construct
  misc_feature 1..21: note = Synthetic construct
  source 1..21: mol_type = other DNA
tttgggtcgctttgactattg

SEQ ID NO: 4711 - DNA, 21 bp, synthetic construct
  misc_feature 1..21: note = Synthetic construct
  source 1..21: mol_type = other DNA
ttgggtcgctttgactattgc

SEQ ID NO: 4712 - DNA, 21 bp, synthetic construct
  misc_feature 1..21: note = Synthetic construct
  source 1..21: mol_type = other DNA
tgggtcgctttgactattgcc

SEQ ID NO: 4713 - DNA, 21 bp, synthetic construct
  misc_feature 1..21: note = Synthetic construct
  source 1..21: mol_type = other DNA
gggtcgctttgactattgccc

SEQ ID NO: 4714 - DNA, 21 bp, synthetic construct
  misc_feature 1..21: note = Synthetic construct
  source 1..21: mol_type = other DNA
ggtcgctttgactattgccca

SEQ ID NO: 4715 - DNA, 21 bp, synthetic construct
  misc_feature 1..21: note = Synthetic construct
  source 1..21: mol_type = other DNA
gtcgctttgactattgcccag

SEQ ID NO: 4716 - DNA, 21 bp, synthetic construct
  misc_feature 1..21: note = Synthetic construct
  source 1..21: mol_type = other DNA
tcgctttgactattgcccaga

SEQ ID NO: 4717 - DNA, 21 bp, synthetic construct
  misc_feature 1..21: note = Synthetic construct
  source 1..21: mol_type = other DNA
cgctttgactattgcccagaa

SEQ ID NO: 4718 - DNA, 21 bp, synthetic construct
  misc_feature 1..21: note = Synthetic construct
  source 1..21: mol_type = other DNA
gctttgactattgcccagaat

SEQ ID NO: 4719 - DNA, 21 bp, synthetic construct
  misc_feature 1..21: note = Synthetic construct
  source 1..21: mol_type = other DNA
ctttgactattgcccagaata

SEQ ID NO: 4720 - DNA, 21 bp, synthetic construct
  misc_feature 1..21: note = Synthetic construct
  source 1..21: mol_type = other DNA
tttgactattgcccagaatat

SEQ ID NO: 4721 - DNA, 21 bp, synthetic construct
  misc_feature 1..21: note = Synthetic construct
  source 1..21: mol_type = other DNA
ttgactattgcccagaatatc

SEQ ID NO: 4722 - DNA, 21 bp, synthetic construct
  misc_feature 1..21: note = Synthetic construct
  source 1..21: mol_type = other DNA
tgactattgcccagaatatca

SEQ ID NO: 4723 - DNA, 21 bp, synthetic construct
  misc_feature 1..21: note = Synthetic construct
  source 1..21: mol_type = other DNA
gactattgcccagaatatcat

SEQ ID NO: 4724 - DNA, 21 bp, synthetic construct
  misc_feature 1..21: note = Synthetic construct
  source 1..21: mol_type = other DNA
actattgcccagaatatcatg

SEQ ID NO: 4725 - DNA, 21 bp, synthetic construct
  misc_feature 1..21: note = Synthetic construct
  source 1..21: mol_type = other DNA
ctattgcccagaatatcatgg

SEQ ID NO: 4726 - DNA, 21 bp, synthetic construct
  misc_feature 1..21: note = Synthetic construct
  source 1..21: mol_type = other DNA
tattgcccagaatatcatgga

SEQ ID NO: 4727 - DNA, 21 bp, synthetic construct
  misc_feature 1..21: note = Synthetic construct
  source 1..21: mol_type = other DNA
attgcccagaatatcatggac

SEQ ID NO: 4728 - DNA, 21 bp, synthetic construct
  misc_feature 1..21: note = Synthetic construct
  source 1..21: mol_type = other DNA
ttgcccagaatatcatggact

SEQ ID NO: 4729 - DNA, 21 bp, synthetic construct
  misc_feature 1..21: note = Synthetic construct
  source 1..21: mol_type = other DNA
tgcccagaatatcatggactc

SEQ ID NO: 4730 - DNA, 21 bp, synthetic construct
  misc_feature 1..21: note = Synthetic construct
  source 1..21: mol_type = other DNA
gcccagaatatcatggactct

SEQ ID NO: 4731 - DNA, 21 bp, synthetic construct
  misc_feature 1..21: note = Synthetic construct
  source 1..21: mol_type = other DNA
cccagaatatcatggactcta

SEQ ID NO: 4732 - DNA, 21 bp, synthetic construct
  misc_feature 1..21: note = Synthetic construct
  source 1..21: mol_type = other DNA
ccagaatatcatggactctag

SEQ ID NO: 4733 - DNA, 21 bp, synthetic construct
  misc_feature 1..21: note = Synthetic construct
  source 1..21: mol_type = other DNA
cagaatatcatggactctagc

SEQ ID NO: 4734 - DNA, 21 bp, synthetic construct
  misc_feature 1..21: note = Synthetic construct
  source 1..21: mol_type = other DNA
agaatatcatggactctagct

SEQ ID NO: 4735 - DNA, 21 bp, synthetic construct
  misc_feature 1..21: note = Synthetic construct
  source 1..21: mol_type = other DNA
gaatatcatggactctagctc

SEQ ID NO: 4736 - DNA, 21 bp, synthetic construct
  misc_feature 1..21: note = Synthetic construct
  source 1..21: mol_type = other DNA
aatatcatggactctagctca

SEQ ID NO: 4737 - DNA, 21 bp, synthetic construct
  misc_feature 1..21: note = Synthetic construct
  source 1..21: mol_type = other DNA
atatcatggactctagctcaa

SEQ ID NO: 4738 - DNA, 21 bp, synthetic construct
  misc_feature 1..21: note = Synthetic construct
  source 1..21: mol_type = other DNA
tatcatggactctagctcaaa

SEQ ID NO: 4739 - DNA, 21 bp, synthetic construct
  misc_feature 1..21: note = Synthetic construct
  source 1..21: mol_type = other DNA
atcatggactctagctcaaat

SEQ ID NO: 4740 - DNA, 21 bp, synthetic construct
  misc_feature 1..21: note = Synthetic construct
  source 1..21: mol_type = other DNA
tcatggactctagctcaaatg

SEQ ID NO: 4741 - DNA, 21 bp, synthetic construct
  misc_feature 1..21: note = Synthetic construct
  source 1..21: mol_type = other DNA
catggactctagctcaaatgt

SEQ ID NO: 4742 - DNA, 21 bp, synthetic construct
  misc_feature 1..21: note = Synthetic construct
  source 1..21: mol_type = other DNA
atggactctagctcaaatgtg

SEQ ID NO: 4743 - DNA, 21 bp, synthetic construct
  misc_feature 1..21: note = Synthetic construct
  source 1..21: mol_type = other DNA
tggactctagctcaaatgtga

SEQ ID NO: 4744 - DNA, 21 bp, synthetic construct
  misc_feature 1..21: note = Synthetic construct
  source 1..21: mol_type = other DNA
ggactctagctcaaatgtgaa

SEQ ID NO: 4745 - DNA, 21 bp, synthetic construct
  misc_feature 1..21: note = Synthetic construct
  source 1..21: mol_type = other DNA
gactctagctcaaatgtgaac

SEQ ID NO: 4746 - DNA, 21 bp, synthetic construct
  misc_feature 1..21: note = Synthetic construct
  source 1..21: mol_type = other DNA
actctagctcaaatgtgaacc

SEQ ID NO: 4747 - DNA, 21 bp, synthetic construct
  misc_feature 1..21: note = Synthetic construct
  source 1..21: mol_type = other DNA
ctctagctcaaatgtgaaccc

SEQ ID NO: 4748 - DNA, 21 bp, synthetic construct
  misc_feature 1..21: note = Synthetic construct
  source 1..21: mol_type = other DNA
tctagctcaaatgtgaaccca

SEQ ID NO: 4749 - DNA, 21 bp, synthetic construct
  misc_feature 1..21: note = Synthetic construct
  source 1..21: mol_type = other DNA
ctagctcaaatgtgaacccat

SEQ ID NO: 4750 - DNA, 21 bp, synthetic construct
  misc_feature 1..21: note = Synthetic construct
  source 1..21: mol_type = other DNA
tagctcaaatgtgaacccatt

SEQ ID NO: 4751 - DNA, 21 bp, synthetic construct
  misc_feature 1..21: note = Synthetic construct
  source 1..21: mol_type = other DNA
agctcaaatgtgaacccattt

SEQ ID NO: 4752 - DNA, 21 bp, synthetic construct
  misc_feature 1..21: note = Synthetic construct
  source 1..21: mol_type = other DNA
gctcaaatgtgaacccatttc

SEQ ID NO: 4753 - DNA, 21 bp, synthetic construct
  misc_feature 1..21: note = Synthetic construct
  source 1..21: mol_type = other DNA
ctcaaatgtgaacccatttcc

SEQ ID NO: 4754 - DNA, 21 bp, synthetic construct
  misc_feature 1..21: note = Synthetic construct
  source 1..21: mol_type = other DNA
tcaaatgtgaacccatttccc

SEQ ID NO: 4755 - DNA, 21 bp, synthetic construct
  misc_feature 1..21: note = Synthetic construct
  source 1..21: mol_type = other DNA
caaatgtgaacccatttccca

SEQ ID NO: 4756 - DNA, 21 bp, synthetic construct
  misc_feature 1..21: note = Synthetic construct
  source 1..21: mol_type = other DNA
aaatgtgaacccatttcccat

SEQ ID NO: 4757 - DNA, 21 bp, synthetic construct
  misc_feature 1..21: note = Synthetic construct
  source 1..21: mol_type = other DNA
aatgtgaacccatttcccatt

SEQ ID NO: 4758 - DNA, 21 bp, synthetic construct
  misc_feature 1..21: note = Synthetic construct
  source 1..21: mol_type = other DNA
atgtgaacccatttcccattg

SEQ ID NO: 4759 - DNA, 21 bp, synthetic construct
  misc_feature 1..21: note = Synthetic construct
  source 1..21: mol_type = other DNA
tgtgaacccatttcccattgt

SEQ ID NO: 4760 - DNA, 21 bp, synthetic construct
  misc_feature 1..21: note = Synthetic construct
  source 1..21: mol_type = other DNA
gtgaacccatttcccattgtg

SEQ ID NO: 4761 - DNA, 21 bp, synthetic construct
  misc_feature 1..21: note = Synthetic construct
  source 1..21: mol_type = other DNA
tgaacccatttcccattgtgg

SEQ ID NO: 4762 - DNA, 21 bp, synthetic construct
  misc_feature 1..21: note = Synthetic construct
  source 1..21: mol_type = other DNA
gaacccatttcccattgtgga

SEQ ID NO: 4763 - DNA, 21 bp, synthetic construct
  misc_feature 1..21: note = Synthetic construct
  source 1..21: mol_type = other DNA
aacccatttcccattgtggaa

SEQ ID NO: 4764 - DNA, 21 bp, synthetic construct
  misc_feature 1..21: note = Synthetic construct
  source 1..21: mol_type = other DNA
acccatttcccattgtggaaa

SEQ ID NO: 4765 - DNA, 21 bp, synthetic construct
  misc_feature 1..21: note = Synthetic construct
  source 1..21: mol_type = other DNA
cccatttcccattgtggaaaa

SEQ ID NO: 4766 - DNA, 21 bp, synthetic construct
  misc_feature 1..21: note = Synthetic construct
  source 1..21: mol_type = other DNA
ccatttcccattgtggaaaat

SEQ ID NO: 4767 - DNA, 21 bp, synthetic construct
  misc_feature 1..21: note = Synthetic construct
  source 1..21: mol_type = other DNA
catttcccattgtggaaaata

SEQ ID NO: 4768 - DNA, 21 bp, synthetic construct
  misc_feature 1..21: note = Synthetic construct
  source 1..21: mol_type = other DNA
atttcccattgtggaaaatag

SEQ ID NO: 4769 - DNA, 21 bp, synthetic construct
  misc_feature 1..21: note = Synthetic construct
  source 1..21: mol_type = other DNA
tttcccattgtggaaaatagt

SEQ ID NO: 4770 - DNA, 21 bp, synthetic construct
  misc_feature 1..21: note = Synthetic construct
  source 1..21: mol_type = other DNA
ttcccattgtggaaaatagtt

SEQ ID NO: 4771 - DNA, 21 bp, synthetic construct
  misc_feature 1..21: note = Synthetic construct
  source 1..21: mol_type = other DNA
tcccattgtggaaaatagttc

SEQ ID NO: 4772 - DNA, 21 bp, synthetic construct
  misc_feature 1..21: note = Synthetic construct
  source 1..21: mol_type = other DNA
cccattgtggaaaatagttcc

SEQ ID NO: 4773 - DNA, 21 bp, synthetic construct
  misc_feature 1..21: note = Synthetic construct
  source 1..21: mol_type = other DNA
ccattgtggaaaatagttccc

SEQ ID NO: 4774 - DNA, 21 bp, synthetic construct
  misc_feature 1..21: note = Synthetic construct
  source 1..21: mol_type = other DNA
cattgtggaaaatagttccca

SEQ ID NO: 4775 - DNA, 21 bp, synthetic construct
  misc_feature 1..21: note = Synthetic construct
  source 1..21: mol_type = other DNA
attgtggaaaatagttcccat

SEQ ID NO: 4776 - DNA, 21 bp, synthetic construct
  misc_feature 1..21: note = Synthetic construct
  source 1..21: mol_type = other DNA
ttgtggaaaatagttcccatc

SEQ ID NO: 4777 - DNA, 21 bp, synthetic construct
  misc_feature 1..21: note = Synthetic construct
  source 1..21: mol_type = other DNA
tgtggaaaatagttcccatcg

SEQ ID NO: 4778 - DNA, 21 bp, synthetic construct
  misc_feature 1..21: note = Synthetic construct
  source 1..21: mol_type = other DNA
gtggaaaatagttcccatcgt

SEQ ID NO: 4779 - DNA, 21 bp, synthetic construct
  misc_feature 1..21: note = Synthetic construct
  source 1..21: mol_type = other DNA
tggaaaatagttcccatcgta

SEQ ID NO: 4780 - DNA, 21 bp, synthetic construct
  misc_feature 1..21: note = Synthetic construct
  source 1..21: mol_type = other DNA
ggaaaatagttcccatcgtat

SEQ ID NO: 4781 - DNA, 21 bp, synthetic construct
  misc_feature 1..21: note = Synthetic construct
  source 1..21: mol_type = other DNA
gaaaatagttcccatcgtatc

SEQ ID NO: 4782 - DNA, 21 bp, synthetic construct
  misc_feature 1..21: note = Synthetic construct
  source 1..21: mol_type = other DNA
aaaatagttcccatcgtatcg

SEQ ID NO: 4783 - DNA, 21 bp, synthetic construct
  misc_feature 1..21: note = Synthetic construct
  source 1..21: mol_type = other DNA
aaatagttcccatcgtatcgt

SEQ ID NO: 4784 - DNA, 21 bp, synthetic construct
  misc_feature 1..21: note = Synthetic construct
  source 1..21: mol_type = other DNA
aatagttcccatcgtatcgtc

SEQ ID NO: 4785 - DNA, 21 bp, synthetic construct
  misc_feature 1..21: note = Synthetic construct
  source 1..21: mol_type = other DNA
atagttcccatcgtatcgtct

SEQ ID NO: 4786 - DNA, 21 bp, synthetic construct
  misc_feature 1..21: note = Synthetic construct
  source 1..21: mol_type = other DNA
tagttcccatcgtatcgtctc

SEQ ID NO: 4787 - DNA, 21 bp, synthetic construct
  misc_feature 1..21: note = Synthetic construct
  source 1..21: mol_type = other DNA
agttcccatcgtatcgtctcg

SEQ ID NO: 4788 - DNA, 21 bp, synthetic construct
  misc_feature 1..21: note = Synthetic construct
  source 1..21: mol_type = other DNA
gttcccatcgtatcgtctcgc

SEQ ID NO: 4789 - DNA, 21 bp, synthetic construct
  misc_feature 1..21: note = Synthetic construct
  source 1..21: mol_type = other DNA
ttcccatcgtatcgtctcgcc

SEQ ID NO: 4790 - DNA, 21 bp, synthetic construct
  misc_feature 1..21: note = Synthetic construct
  source 1..21: mol_type = other DNA
tcccatcgtatcgtctcgcca

SEQ ID NO: 4791 - DNA, 21 bp, synthetic construct
  misc_feature 1..21: note = Synthetic construct
  source 1..21: mol_type = other DNA
cccatcgtatcgtctcgccat

SEQ ID NO: 4792 - DNA, 21 bp, synthetic construct
  misc_feature 1..21: note = Synthetic construct
  source 1..21: mol_type = other DNA
ccatcgtatcgtctcgccatc

SEQ ID NO: 4793 - DNA, 21 bp, synthetic construct
  misc_feature 1..21: note = Synthetic construct
  source 1..21: mol_type = other DNA
catcgtatcgtctcgccatct

SEQ ID NO: 4794 - DNA, 21 bp, synthetic construct
  misc_feature 1..21: note = Synthetic construct
  source 1..21: mol_type = other DNA
atcgtatcgtctcgccatcta

SEQ ID NO: 4795 - DNA, 21 bp, synthetic construct
  misc_feature 1..21: note = Synthetic construct
  source 1..21: mol_type = other DNA
tcgtatcgtctcgccatctac

SEQ ID NO: 4796 - DNA, 21 bp, synthetic construct
  misc_feature 1..21: note = Synthetic construct
  source 1..21: mol_type = other DNA
cgtatcgtctcgccatctacg

SEQ ID NO: 4797 - DNA, 21 bp, synthetic construct
  misc_feature 1..21: note = Synthetic construct
  source 1..21: mol_type = other DNA
gtatcgtctcgccatctacga

SEQ ID NO: 4798 - DNA, 21 bp, synthetic construct
  misc_feature 1..21: note = Synthetic construct
  source 1..21: mol_type = other DNA
tatcgtctcgccatctacgat

SEQ ID NO: 4799 - DNA, 21 bp, synthetic construct
  misc_feature 1..21: note = Synthetic construct
  source 1..21: mol_type = other DNA
atcgtctcgccatctacgatt

SEQ ID NO: 4800 - DNA, 21 bp, synthetic construct
  misc_feature 1..21: note = Synthetic construct
  source 1..21: mol_type = other DNA
tcgtctcgccatctacgattc

SEQ ID NO: 4801 - DNA, 21 bp, synthetic construct
  misc_feature 1..21: note = Synthetic construct
  source 1..21: mol_type = other DNA
cgtctcgccatctacgattcc

SEQ ID NO: 4802 - DNA, 21 bp, synthetic construct
  misc_feature 1..21: note = Synthetic construct
  source 1..21: mol_type = other DNA
gtctcgccatctacgattccg

SEQ ID NO: 4803 - DNA, 21 bp, synthetic construct
  misc_feature 1..21: note = Synthetic construct
  source 1..21: mol_type = other DNA
tctcgccatctacgattccgt

SEQ ID NO: 4804 - DNA, 21 bp, synthetic construct
  misc_feature 1..21: note = Synthetic construct
  source 1..21: mol_type = other DNA
ctcgccatctacgattccgta

SEQ ID NO: 4805 - DNA, 21 bp, synthetic construct
  misc_feature 1..21: note = Synthetic construct
  source 1..21: mol_type = other DNA
tcgccatctacgattccgtag

SEQ ID NO: 4806 - DNA, 21 bp, synthetic construct
  misc_feature 1..21: note = Synthetic construct
  source 1..21: mol_type = other DNA
cgccatctacgattccgtagt

SEQ ID NO: 4807 - DNA, 21 bp, synthetic construct
  misc_feature 1..21: note = Synthetic construct
  source 1..21: mol_type = other DNA
gccatctacgattccgtagtg

SEQ ID NO: 4808 - DNA, 21 bp, synthetic construct
  misc_feature 1..21: note = Synthetic construct
  source 1..21: mol_type = other DNA
ccatctacgattccgtagtgt

SEQ ID NO: 4809 - DNA, 21 bp, synthetic construct
  misc_feature 1..21: note = Synthetic construct
  source 1..21: mol_type = other DNA
catctacgattccgtagtgtg

SEQ ID NO: 4810 - DNA, 21 bp, synthetic construct
  misc_feature 1..21: note = Synthetic construct
  source 1..21: mol_type = other DNA
atctacgattccgtagtgtga

SEQ ID NO: 4811 - DNA, 21 bp, synthetic construct
  misc_feature 1..21: note = Synthetic construct
  source 1..21: mol_type = other DNA
tctacgattccgtagtgtgag

SEQ ID NO: 4812 - DNA, 21 bp, synthetic construct
  misc_feature 1..21: note = Synthetic construct
  source 1..21: mol_type = other DNA
ctacgattccgtagtgtgagc

SEQ ID NO: 4813 - DNA, 21 bp, synthetic construct
  misc_feature 1..21: note = Synthetic construct
  source 1..21: mol_type = other DNA
tacgattccgtagtgtgagcg

SEQ ID NO: 4814 - DNA, 21 bp, synthetic construct
  misc_feature 1..21: note = Synthetic construct
  source 1..21: mol_type = other DNA
acgattccgtagtgtgagcgg

SEQ ID NO: 4815 - DNA, 21 bp, synthetic construct
  misc_feature 1..21: note = Synthetic construct
  source 1..21: mol_type = other DNA
cgattccgtagtgtgagcgga

SEQ ID NO: 4816 - DNA, 21 bp, synthetic construct
  misc_feature 1..21: note = Synthetic construct
  source 1..21: mol_type = other DNA
gattccgtagtgtgagcggat

SEQ ID NO: 4817 - DNA, 21 bp, synthetic construct
  misc_feature 1..21: note = Synthetic construct
  source 1..21: mol_type = other DNA
attccgtagtgtgagcggata

SEQ ID NO: 4818 - DNA, 21 bp, synthetic construct
  misc_feature 1..21: note = Synthetic construct
  source 1..21: mol_type = other DNA
ttccgtagtgtgagcggatac

SEQ ID NO: 4819 - DNA, 21 bp, synthetic construct
  misc_feature 1..21: note = Synthetic construct
  source 1..21: mol_type = other DNA
tccgtagtgtgagcggatacg

SEQ ID NO: 4820 - DNA, 21 bp, synthetic construct
  misc_feature 1..21: note = Synthetic construct
  source 1..21: mol_type = other DNA
ccgtagtgtgagcggatacga

SEQ ID NO: 4821 - DNA, 21 bp, synthetic construct
  misc_feature 1..21: note = Synthetic construct
  source 1..21: mol_type = other DNA
cgtagtgtgagcggatacgat

SEQ ID NO: 4822 - DNA, 21 bp, synthetic construct
  misc_feature 1..21: note = Synthetic construct
  source 1..21: mol_type = other DNA
gtagtgtgagcggatacgatc

SEQ ID NO: 4823 - DNA, 21 bp, synthetic construct
  misc_feature 1..21: note = Synthetic construct
  source 1..21: mol_type = other DNA
tagtgtgagcggatacgatcg

SEQ ID NO: 4824 - DNA, 21 bp, synthetic construct
  misc_feature 1..21: note = Synthetic construct
  source 1..21: mol_type = other DNA
agtgtgagcggatacgatcga

SEQ ID NO: 4825 - DNA, 21 bp, synthetic construct
  misc_feature 1..21: note = Synthetic construct
  source 1..21: mol_type = other DNA
gtgtgagcggatacgatcgag

SEQ ID NO: 4826 - DNA, 21 bp, synthetic construct
  misc_feature 1..21: note = Synthetic construct
  source 1..21: mol_type = other DNA
tgtgagcggatacgatcgaga

SEQ ID NO: 4827 - DNA, 21 bp, synthetic construct
  misc_feature 1..21: note = Synthetic construct
  source 1..21: mol_type = other DNA
gtgagcggatacgatcgagat

SEQ ID NO: 4828 - DNA, 21 bp, synthetic construct
  misc_feature 1..21: note = Synthetic construct
  source 1..21: mol_type = other DNA
tgagcggatacgatcgagata

SEQ ID NO: 4829 - DNA, 21 bp, synthetic construct
  misc_feature 1..21: note = Synthetic construct
  source 1..21: mol_type = other DNA
gagcggatacgatcgagatat

SEQ ID NO: 4830 - DNA, 21 bp, synthetic construct
  misc_feature 1..21: note = Synthetic construct
  source 1..21: mol_type = other DNA
agcggatacgatcgagatatg

SEQ ID NO: 4831 - DNA, 21 bp, synthetic construct
  misc_feature 1..21: note = Synthetic construct
  source 1..21: mol_type = other DNA
gcggatacgatcgagatatga

SEQ ID NO: 4832 - DNA, 21 bp, synthetic construct
  misc_feature 1..21: note = Synthetic construct
  source 1..21: mol_type = other DNA
cggatacgatcgagatatgaa

SEQ ID NO: 4833 - DNA, 21 bp, synthetic construct
  misc_feature 1..21: note = Synthetic construct
  source 1..21: mol_type = other DNA
ggatacgatcgagatatgaat

SEQ ID NO: 4834 - DNA, 21 bp, synthetic construct
  misc_feature 1..21: note = Synthetic construct
  source 1..21: mol_type = other DNA
gatacgatcgagatatgaata

SEQ ID NO: 4835 - DNA, 21 bp, synthetic construct
  misc_feature 1..21: note = Synthetic construct
  source 1..21: mol_type = other DNA
atacgatcgagatatgaatat

SEQ ID NO: 4836 - DNA, 21 bp, synthetic construct
  misc_feature 1..21: note = Synthetic construct
  source 1..21: mol_type = other DNA
tacgatcgagatatgaatata

SEQ ID NO: 4837 - DNA, 21 bp, synthetic construct
  misc_feature 1..21: note = Synthetic construct
  source 1..21: mol_type = other DNA
acgatcgagatatgaatatag

SEQ ID NO: 4838 - DNA, 21 bp, synthetic construct
  misc_feature 1..21: note = Synthetic construct
  source 1..21: mol_type = other DNA
cgatcgagatatgaatatagc

SEQ ID NO: 4839 - DNA, 21 bp, synthetic construct
  misc_feature 1..21: note = Synthetic construct
  source 1..21: mol_type = other DNA
gatcgagatatgaatatagct

SEQ ID NO: 4840 - DNA, 21 bp, synthetic construct
  misc_feature 1..21: note = Synthetic construct
  source 1..21: mol_type = other DNA
atcgagatatgaatatagctc

SEQ ID NO: 4841 - DNA, 21 bp, synthetic construct
  misc_feature 1..21: note = Synthetic construct
  source 1..21: mol_type = other DNA
tcgagatatgaatatagctct

SEQ ID NO: 4842 - DNA, 21 bp, synthetic construct
  misc_feature 1..21: note = Synthetic construct
  source 1..21: mol_type = other DNA
cgagatatgaatatagctctg

SEQ ID NO: 4843 - DNA, 21 bp, synthetic construct
  misc_feature 1..21: note = Synthetic construct
  source 1..21: mol_type = other DNA
gagatatgaatatagctctgg

SEQ ID NO: 4844 - DNA, 21 bp, synthetic construct
  misc_feature 1..21: note = Synthetic construct
  source 1..21: mol_type = other DNA
agatatgaatatagctctggt

SEQ ID NO: 4845 - DNA, 21 bp, synthetic construct
  misc_feature 1..21: note = Synthetic construct
  source 1..21: mol_type = other DNA
gatatgaatatagctctggtg

SEQ ID NO: 4846 - DNA, 21 bp, synthetic construct
  misc_feature 1..21: note = Synthetic construct
  source 1..21: mol_type = other DNA
atatgaatatagctctggtgg

SEQ ID NO: 4847 - DNA, 21 bp, synthetic construct
  misc_feature 1..21: note = Synthetic construct
  source 1..21: mol_type = other DNA
tatgaatatagctctggtggg

SEQ ID NO: 4848 - DNA, 21 bp, synthetic construct
  misc_feature 1..21: note = Synthetic construct
  source 1..21: mol_type = other DNA
atgaatatagctctggtggga

SEQ ID NO: 4849 - DNA, 21 bp, synthetic construct
  misc_feature 1..21: note = Synthetic construct
  source 1..21: mol_type = other DNA
tgaatatagctctggtgggag

SEQ ID NO: 4850 - DNA, 21 bp, synthetic construct
  misc_feature 1..21: note = Synthetic construct
  source 1..21: mol_type = other DNA
gaatatagctctggtgggaga

SEQ ID NO: 4851 - DNA, 21 bp, synthetic construct
  misc_feature 1..21: note = Synthetic construct
  source 1..21: mol_type = other DNA
aatatagctctggtgggagaa

SEQ ID NO: 4852 - DNA, 21 bp, synthetic construct
  misc_feature 1..21: note = Synthetic construct
  source 1..21: mol_type = other DNA
atatagctctggtgggagaaa

SEQ ID NO: 4853 - DNA, 21 bp, synthetic construct
  misc_feature 1..21: note = Synthetic construct
  source 1..21: mol_type = other DNA
tatagctctggtgggagaaaa

SEQ ID NO: 4854 - DNA, 21 bp, synthetic construct
  misc_feature 1..21: note = Synthetic construct
  source 1..21: mol_type = other DNA
atagctctggtgggagaaaac

SEQ ID NO: 4855 - DNA, 21 bp, synthetic construct
  misc_feature 1..21: note = Synthetic construct
  source 1..21: mol_type = other DNA
tagctctggtgggagaaaact

SEQ ID NO: 4856 - DNA, 21 bp, synthetic construct
  misc_feature 1..21: note = Synthetic construct
  source 1..21: mol_type = other DNA
agctctggtgggagaaaactc

SEQ ID NO: 4857 - DNA, 21 bp, synthetic construct
  misc_feature 1..21: note = Synthetic construct
  source 1..21: mol_type = other DNA
gctctggtgggagaaaactcc

SEQ ID NO: 4858 - DNA, 21 bp, synthetic construct
  misc_feature 1..21: note = Synthetic construct
  source 1..21: mol_type = other DNA
ctctggtgggagaaaactcca

SEQ ID NO: 4859 - DNA, 21 bp, synthetic construct
  misc_feature 1..21: note = Synthetic construct
  source 1..21: mol_type = other DNA
tctggtgggagaaaactccac

SEQ ID NO: 4860 - DNA, 21 bp, synthetic construct
  misc_feature 1..21: note = Synthetic construct
  source 1..21: mol_type = other DNA
ctggtgggagaaaactccaca

SEQ ID NO: 4861 - DNA, 21 bp, synthetic construct
  misc_feature 1..21: note = Synthetic construct
  source 1..21: mol_type = other DNA
tggtgggagaaaactccacac

SEQ ID NO: 4862 - DNA, 21 bp, synthetic construct
  misc_feature 1..21: note = Synthetic construct
  source 1..21: mol_type = other DNA
ggtgggagaaaactccacacc

SEQ ID NO: 4863 - DNA, 21 bp, synthetic construct
  misc_feature 1..21: note = Synthetic construct
  source 1..21: mol_type = other DNA
gtgggagaaaactccacacca

SEQ ID NO: 4864 - DNA, 21 bp, synthetic construct
  misc_feature 1..21: note = Synthetic construct
  source 1..21: mol_type = other DNA
tgggagaaaactccacaccag

SEQ ID NO: 4865 - DNA, 21 bp, synthetic construct
  misc_feature 1..21: note = Synthetic construct
  source 1..21: mol_type = other DNA
gggagaaaactccacaccagg

SEQ ID NO: 4866 - DNA, 21 bp, synthetic construct
  misc_feature 1..21: note = Synthetic construct
  source 1..21: mol_type = other DNA
ggagaaaactccacaccaggc

SEQ ID NO: 4867 - DNA, 21 bp, synthetic construct
  misc_feature 1..21: note = Synthetic construct
  source 1..21: mol_type = other DNA
gagaaaactccacaccaggcg

SEQ ID NO: 4868 - DNA, 21 bp, synthetic construct
  misc_feature 1..21: note = Synthetic construct
  source 1..21: mol_type = other DNA
agaaaactccacaccaggcga

SEQ ID NO: 4869 - DNA, 21 bp, synthetic construct
  misc_feature 1..21: note = Synthetic construct
  source 1..21: mol_type = other DNA
gaaaactccacaccaggcgat

SEQ ID NO: 4870 - DNA, 21 bp, synthetic construct
  misc_feature 1..21: note = Synthetic construct
  source 1..21: mol_type = other DNA
aaaactccacaccaggcgatc

SEQ ID NO: 4871 - DNA, 21 bp, synthetic construct
  misc_feature 1..21: note = Synthetic construct
  source 1..21: mol_type = other DNA
aaactccacaccaggcgatcg

SEQ ID NO: 4872 - DNA, 21 bp, synthetic construct
  misc_feature 1..21: note = Synthetic construct
  source 1..21: mol_type = other DNA
aactccacaccaggcgatcgg

SEQ ID NO: 4873 - DNA, 21 bp, synthetic construct
  misc_feature 1..21: note = Synthetic construct
  source 1..21: mol_type = other DNA
actccacaccaggcgatcgga

SEQ ID NO: 4874 - DNA, 21 bp, synthetic construct
  misc_feature 1..21: note = Synthetic construct
  source 1..21: mol_type = other DNA
ctccacaccaggcgatcggag

SEQ ID NO: 4875 - DNA, 21 bp, synthetic construct
  misc_feature 1..21: note = Synthetic construct
  source 1..21: mol_type = other DNA
tccacaccaggcgatcggaga

SEQ ID NO: 4876 - DNA, 21 bp, synthetic construct
  misc_feature 1..21: note = Synthetic construct
  source 1..21: mol_type = other DNA
ccacaccaggcgatcggagat

SEQ ID NO: 4877 - DNA, 21 bp, synthetic construct
  misc_feature 1..21: note = Synthetic construct
  source 1..21: mol_type = other DNA
cacaccaggcgatcggagatg

SEQ ID NO: 4878 - DNA, 21 bp, synthetic construct
  misc_feature 1..21: note = Synthetic construct
  source 1..21: mol_type = other DNA
acaccaggcgatcggagatgg

SEQ ID NO: 4879 - DNA, 21 bp, synthetic construct
  misc_feature 1..21: note = Synthetic construct
  source 1..21: mol_type = other DNA
caccaggcgatcggagatgga

SEQ ID NO: 4880 - DNA, 21 bp, synthetic construct
  misc_feature 1..21: note = Synthetic construct
  source 1..21: mol_type = other DNA
accaggcgatcggagatggaa

SEQ ID NO: 4881 - DNA, 21 bp, synthetic construct
  misc_feature 1..21: note = Synthetic construct
  source 1..21: mol_type = other DNA
ccaggcgatcggagatggaat

SEQ ID NO: 4882 - DNA, 21 bp, synthetic construct
  misc_feature 1..21: note = Synthetic construct
  source 1..21: mol_type = other DNA
caggcgatcggagatggaatc

SEQ ID NO: 4883 - DNA, 21 bp, synthetic construct
  misc_feature 1..21: note = Synthetic construct
  source 1..21: mol_type = other DNA
aggcgatcggagatggaatcg

SEQ ID NO: 4884 - DNA, 21 bp, synthetic construct
  misc_feature 1..21: note = Synthetic construct
  source 1..21: mol_type = other DNA
ggcgatcggagatggaatcgg

SEQ ID NO: 4885 - DNA, 21 bp, synthetic construct
  misc_feature 1..21: note = Synthetic construct
  source 1..21: mol_type = other DNA
gcgatcggagatggaatcgga

SEQ ID NO: 4886 - DNA, 21 bp, synthetic construct
  misc_feature 1..21: note = Synthetic construct
  source 1..21: mol_type = other DNA
cgatcggagatggaatcggat

SEQ ID NO: 4887 - DNA, 21 bp, synthetic construct
  misc_feature 1..21: note = Synthetic construct
  source 1..21: mol_type = other DNA
gatcggagatggaatcggatg

SEQ ID NO: 4888 - DNA, 21 bp, synthetic construct
  misc_feature 1..21: note = Synthetic construct
  source 1..21: mol_type = other DNA
atcggagatggaatcggatgc

SEQ ID NO: 4889 - DNA, 21 bp, synthetic construct
  misc_feature 1..21: note = Synthetic construct
  source 1..21: mol_type = other DNA
tcggagatggaatcggatgca

SEQ ID NO: 4890 - DNA, 21 bp, synthetic construct
  misc_feature 1..21: note = Synthetic construct
  source 1..21: mol_type = other DNA
cggagatggaatcggatgcag

SEQ ID NO: 4891 - DNA, 21 bp, synthetic construct
  misc_feature 1..21: note = Synthetic construct
  source 1..21: mol_type = other DNA
ggagatggaatcggatgcaga

SEQ ID NO: 4892 - DNA, 21 bp, synthetic construct
  misc_feature 1..21: note = Synthetic construct
  source 1..21: mol_type = other DNA
gagatggaatcggatgcagac

SEQ ID NO: 4893 - DNA, 21 bp, synthetic construct
  misc_feature 1..21: note = Synthetic construct
  source 1..21: mol_type = other DNA
agatggaatcggatgcagacg

SEQ ID NO: 4894 - DNA, 21 bp, synthetic construct
  misc_feature 1..21: note = Synthetic construct
  source 1..21: mol_type = other DNA
gatggaatcggatgcagacga

SEQ ID NO: 4895 - DNA, 21 bp, synthetic construct
  misc_feature 1..21: note = Synthetic construct
  source 1..21: mol_type = other DNA
atggaatcggatgcagacgat

SEQ ID NO: 4896 - DNA, 21 bp, synthetic construct
  misc_feature 1..21: note = Synthetic construct
  source 1..21: mol_type = other DNA
tggaatcggatgcagacgata

SEQ ID NO: 4897 - DNA, 21 bp, synthetic construct
  misc_feature 1..21: note = Synthetic construct
  source 1..21: mol_type = other DNA
ggaatcggatgcagacgataa

SEQ ID NO: 4898 - DNA, 21 bp, synthetic construct
  misc_feature 1..21: note = Synthetic construct
  source 1..21: mol_type = other DNA
gaatcggatgcagacgataag

SEQ ID NO: 4899 - DNA, 21 bp, synthetic construct
  misc_feature 1..21: note = Synthetic construct
  source 1..21: mol_type = other DNA
aatcggatgcagacgataagt

SEQ ID NO: 4900 - DNA, 21 bp, synthetic construct
  misc_feature 1..21: note = Synthetic construct
  source 1..21: mol_type = other DNA
atcggatgcagacgataagtc

SEQ ID NO: 4901 - DNA, 21 bp, synthetic construct
  misc_feature 1..21: note = Synthetic construct
  source 1..21: mol_type = other DNA
tcggatgcagacgataagtct

SEQ ID NO: 4902 - DNA, 21 bp, synthetic construct
  misc_feature 1..21: note = Synthetic construct
  source 1..21: mol_type = other DNA
cggatgcagacgataagtcta

SEQ ID NO: 4903 - DNA, 21 bp, synthetic construct
  misc_feature 1..21: note = Synthetic construct
  source 1..21: mol_type = other DNA
ggatgcagacgataagtctat

SEQ ID NO: 4904 - DNA, 21 bp, synthetic construct
  misc_feature 1..21: note = Synthetic construct
  source 1..21: mol_type = other DNA
gatgcagacgataagtctatc

SEQ ID NO: 4905 - DNA, 21 bp, synthetic construct
  misc_feature 1..21: note = Synthetic construct
  source 1..21: mol_type = other DNA
atgcagacgataagtctatcg

SEQ ID NO: 4906 - DNA, 21 bp, synthetic construct
  misc_feature 1..21: note = Synthetic construct
  source 1..21: mol_type = other DNA
tgcagacgataagtctatcgt

SEQ ID NO: 4907 - DNA, 21 bp, synthetic construct
  misc_feature 1..21: note = Synthetic construct
  source 1..21: mol_type = other DNA
gcagacgataagtctatcgtc

SEQ ID NO: 4908 - DNA, 21 bp, synthetic construct
  misc_feature 1..21: note = Synthetic construct
  source 1..21: mol_type = other DNA
cagacgataagtctatcgtcg

SEQ ID NO: 4909 - DNA, 21 bp, synthetic construct
  misc_feature 1..21: note = Synthetic construct
  source 1..21: mol_type = other DNA
agacgataagtctatcgtcgc

SEQ ID NO: 4910 - DNA, 21 bp, synthetic construct
  misc_feature 1..21: note = Synthetic construct
  source 1..21: mol_type = other DNA
gacgataagtctatcgtcgca

SEQ ID NO: 4911 - DNA, 21 bp, synthetic construct
  misc_feature 1..21: note = Synthetic construct
  source 1..21: mol_type = other DNA
acgataagtctatcgtcgcaa

SEQ ID NO: 4912 - DNA, 21 bp, synthetic construct
  misc_feature 1..21: note = Synthetic construct
  source 1..21: mol_type = other DNA
cgataagtctatcgtcgcaag

SEQ ID NO: 4913 - DNA, 21 bp, synthetic construct
  misc_feature 1..21: note = Synthetic construct
  source 1..21: mol_type = other DNA
gataagtctatcgtcgcaagc

SEQ ID NO: 4914 - DNA, 21 bp, synthetic construct
  misc_feature 1..21: note = Synthetic construct
  source 1..21: mol_type = other DNA
ataagtctatcgtcgcaagcg

SEQ ID NO: 4915 - DNA, 21 bp, synthetic construct
  misc_feature 1..21: note = Synthetic construct
  source 1..21: mol_type = other DNA
taagtctatcgtcgcaagcga

SEQ ID NO: 4916 - DNA, 21 bp, synthetic construct
  misc_feature 1..21: note = Synthetic construct
  source 1..21: mol_type = other DNA
aagtctatcgtcgcaagcgaa

SEQ ID NO: 4917 - DNA, 21 bp, synthetic construct
  misc_feature 1..21: note = Synthetic construct
  source 1..21: mol_type = other DNA
agtctatcgtcgcaagcgaac

SEQ ID NO: 4918 - DNA, 21 bp, synthetic construct
  misc_feature 1..21: note = Synthetic construct
  source 1..21: mol_type = other DNA
gtctatcgtcgcaagcgaacc

SEQ ID NO: 4919 - DNA, 21 bp, synthetic construct
  misc_feature 1..21: note = Synthetic construct
  source 1..21: mol_type = other DNA
tctatcgtcgcaagcgaacca

SEQ ID NO: 4920 - DNA, 21 bp, synthetic construct
  misc_feature 1..21: note = Synthetic construct
  source 1..21: mol_type = other DNA
ctatcgtcgcaagcgaaccat

SEQ ID NO: 4921 - DNA, 21 bp, synthetic construct
  misc_feature 1..21: note = Synthetic construct
  source 1..21: mol_type = other DNA
tatcgtcgcaagcgaaccatc

SEQ ID NO: 4922 - DNA, 21 bp, synthetic construct
  misc_feature 1..21: note = Synthetic construct
  source 1..21: mol_type = other DNA
atcgtcgcaagcgaaccatct

SEQ ID NO: 4923 - DNA, 21 bp, synthetic construct
  misc_feature 1..21: note = Synthetic construct
  source 1..21: mol_type = other DNA
tcgtcgcaagcgaaccatcta

SEQ ID NO: 4924 - DNA, 21 bp, synthetic construct
  misc_feature 1..21: note = Synthetic construct
  source 1..21: mol_type = other DNA
cgtcgcaagcgaaccatctac

SEQ ID NO: 4925 - DNA, 21 bp, synthetic construct
  misc_feature 1..21: note = Synthetic construct
  source 1..21: mol_type = other DNA
gtcgcaagcgaaccatctacg

SEQ ID NO: 4926 - DNA, 21 bp, synthetic construct
  misc_feature 1..21: note = Synthetic construct
  source 1..21: mol_type = other DNA
tcgcaagcgaaccatctacgc

SEQ ID NO: 4927 - DNA, 21 bp, synthetic construct
  misc_feature 1..21: note = Synthetic construct
  source 1..21: mol_type = other DNA
cgcaagcgaaccatctacgct

SEQ ID NO: 4928 - DNA, 21 bp, synthetic construct
  misc_feature 1..21: note = Synthetic construct
  source 1..21: mol_type = other DNA
gcaagcgaaccatctacgctg

SEQ ID NO: 4929 - DNA, 21 bp, synthetic construct
  misc_feature 1..21: note = Synthetic construct
  source 1..21: mol_type = other DNA
caagcgaaccatctacgctgc

SEQ ID NO: 4930 - DNA, 21 bp, synthetic construct
  misc_feature 1..21: note = Synthetic construct
  source 1..21: mol_type = other DNA
aagcgaaccatctacgctgcc

SEQ ID NO: 4931 - DNA, 21 bp, synthetic construct
  misc_feature 1..21: note = Synthetic construct
  source 1..21: mol_type = other DNA
agcgaaccatctacgctgccc

SEQ ID NO: 4932 - DNA, 21 bp, synthetic construct
  misc_feature 1..21: note = Synthetic construct
  source 1..21: mol_type = other DNA
gcgaaccatctacgctgccct

SEQ ID NO: 4933 - DNA, 21 bp, synthetic construct
  misc_feature 1..21: note = Synthetic construct
  source 1..21: mol_type = other DNA
cgaaccatctacgctgccctg

SEQ ID NO: 4934 - DNA, 21 bp, synthetic construct
  misc_feature 1..21: note = Synthetic construct
  source 1..21: mol_type = other DNA
gaaccatctacgctgccctgc

SEQ ID NO: 4935 - DNA, 21 bp, synthetic construct
  misc_feature 1..21: note = Synthetic construct
  source 1..21: mol_type = other DNA
aaccatctacgctgccctgct

SEQ ID NO: 4936 - DNA, 21 bp, synthetic construct
  misc_feature 1..21: note = Synthetic construct
  source 1..21: mol_type = other DNA
accatctacgctgccctgctg

SEQ ID NO: 4937 - DNA, 21 bp, synthetic construct
  misc_feature 1..21: note = Synthetic construct
  source 1..21: mol_type = other DNA
ccatctacgctgccctgctga

SEQ ID NO: 4938 - DNA, 21 bp, synthetic construct
  misc_feature 1..21: note = Synthetic construct
  source 1..21: mol_type = other DNA
catctacgctgccctgctgag

SEQ ID NO: 4939 - DNA, 21 bp, synthetic construct
  misc_feature 1..21: note = Synthetic construct
  source 1..21: mol_type = other DNA
atctacgctgccctgctgagc

SEQ ID NO: 4940 - DNA, 21 bp, synthetic construct
  misc_feature 1..21: note = Synthetic construct
  source 1..21: mol_type = other DNA
tctacgctgccctgctgagcc

SEQ ID NO: 4941 - DNA, 21 bp, synthetic construct
  misc_feature 1..21: note = Synthetic construct
  source 1..21: mol_type = other DNA
ctacgctgccctgctgagcca

SEQ ID NO: 4942 - DNA, 21 bp, synthetic construct
  misc_feature 1..21: note = Synthetic construct
  source 1..21: mol_type = other DNA
tacgctgccctgctgagccag

SEQ ID NO: 4943 - DNA, 21 bp, synthetic construct
  misc_feature 1..21: note = Synthetic construct
  source 1..21: mol_type = other DNA
acgctgccctgctgagccaga

SEQ ID NO: 4944 - DNA, 21 bp, synthetic construct
  misc_feature 1..21: note = Synthetic construct
  source 1..21: mol_type = other DNA
cgctgccctgctgagccagac

SEQ ID NO: 4945 - DNA, 21 bp, synthetic construct
  misc_feature 1..21: note = Synthetic construct
  source 1..21: mol_type = other DNA
gctgccctgctgagccagacg

SEQ ID NO: 4946 - DNA, 21 bp, synthetic construct
  misc_feature 1..21: note = Synthetic construct
  source 1..21: mol_type = other DNA
ctgccctgctgagccagacgc

SEQ ID NO: 4947 - DNA, 21 bp, synthetic construct
  misc_feature 1..21: note = Synthetic construct
  source 1..21: mol_type = other DNA
tgccctgctgagccagacgct

SEQ ID NO: 4948 - DNA, 21 bp, synthetic construct
  misc_feature 1..21: note = Synthetic construct
  source 1..21: mol_type = other DNA
gccctgctgagccagacgctg

SEQ ID NO: 4949 - DNA, 21 bp, synthetic construct
  misc_feature 1..21: note = Synthetic construct
  source 1..21: mol_type = other DNA
ccctgctgagccagacgctgg

SEQ ID NO: 4950 - DNA, 21 bp, synthetic construct
  misc_feature 1..21: note = Synthetic construct
  source 1..21: mol_type = other DNA
cctgctgagccagacgctggt

SEQ ID NO: 4951 - DNA, 21 bp, synthetic construct
  misc_feature 1..21: note = Synthetic construct
  source 1..21: mol_type = other DNA
ctgctgagccagacgctggtt

SEQ ID NO: 4952 - DNA, 21 bp, synthetic construct
  misc_feature 1..21: note = Synthetic construct
  source 1..21: mol_type = other DNA
tgctgagccagacgctggttg

SEQ ID NO: 4953 - DNA, 21 bp, synthetic construct
  misc_feature 1..21: note = Synthetic construct
  source 1..21: mol_type = other DNA
gctgagccagacgctggttga

SEQ ID NO: 4954 - DNA, 21 bp, synthetic construct
  misc_feature 1..21: note = Synthetic construct
  source 1..21: mol_type = other DNA
ctgagccagacgctggttgat

SEQ ID NO: 4955 - DNA, 21 bp, synthetic construct
  misc_feature 1..21: note = Synthetic construct
  source 1..21: mol_type = other DNA
tgagccagacgctggttgatc

SEQ ID NO: 4956 - DNA, 21 bp, synthetic construct
  misc_feature 1..21: note = Synthetic construct
  source 1..21: mol_type = other DNA
gagccagacgctggttgatcg

SEQ ID NO: 4957 - DNA, 21 bp, synthetic construct
  misc_feature 1..21: note = Synthetic construct
  source 1..21: mol_type = other DNA
agccagacgctggttgatcga

SEQ ID NO: 4958 - DNA, 21 bp, synthetic construct
  misc_feature 1..21: note = Synthetic construct
  source 1..21: mol_type = other DNA
gccagacgctggttgatcgat

SEQ ID NO: 4959 - DNA, 21 bp, synthetic construct
  misc_feature 1..21: note = Synthetic construct
  source 1..21: mol_type = other DNA
ccagacgctggttgatcgatt

SEQ ID NO: 4960 - DNA, 21 bp, synthetic construct
  misc_feature 1..21: note = Synthetic construct
  source 1..21: mol_type = other DNA
cagacgctggttgatcgattg

SEQ ID NO: 4961 - DNA, 21 bp, synthetic construct
  misc_feature 1..21: note = Synthetic construct
  source 1..21: mol_type = other DNA
agacgctggttgatcgattga

SEQ ID NO: 4962 - DNA, 21 bp, synthetic construct
  misc_feature 1..21: note = Synthetic construct
  source 1..21: mol_type = other DNA
gacgctggttgatcgattgat

SEQ ID NO: 4963 - DNA, 21 bp, synthetic construct
  misc_feature 1..21: note = Synthetic construct
  source 1..21: mol_type = other DNA
acgctggttgatcgattgatc

SEQ ID NO: 4964 - DNA, 21 bp, synthetic construct
  misc_feature 1..21: note = Synthetic construct
  source 1..21: mol_type = other DNA
cgctggttgatcgattgatca

SEQ ID NO: 4965 - DNA, 21 bp, synthetic construct
  misc_feature 1..21: note = Synthetic construct
  source 1..21: mol_type = other DNA
gctggttgatcgattgatcat

SEQ ID NO: 4966 - DNA, 21 bp, synthetic construct
  misc_feature 1..21: note = Synthetic construct
  source 1..21: mol_type = other DNA
ctggttgatcgattgatcatt

SEQ ID NO: 4967 - DNA, 21 bp, synthetic construct
  misc_feature 1..21: note = Synthetic construct
  source 1..21: mol_type = other DNA
tggttgatcgattgatcattc

SEQ ID NO: 4968 - DNA, 21 bp, synthetic construct
  misc_feature 1..21: note = Synthetic construct
  source 1..21: mol_type = other DNA
ggttgatcgattgatcattca

SEQ ID NO: 4969 - DNA, 21 bp, synthetic construct
  misc_feature 1..21: note = Synthetic construct
  source 1..21: mol_type = other DNA
gttgatcgattgatcattcag

SEQ ID NO: 4970 - DNA, 21 bp, synthetic construct
  misc_feature 1..21: note = Synthetic construct
  source 1..21: mol_type = other DNA
ttgatcgattgatcattcagg

SEQ ID NO: 4971 - DNA, 21 bp, synthetic construct
  misc_feature 1..21: note = Synthetic construct
  source 1..21: mol_type = other DNA
tgatcgattgatcattcaggt

SEQ ID NO: 4972 - DNA, 21 bp, synthetic construct
  misc_feature 1..21: note = Synthetic construct
  source 1..21: mol_type = other DNA
gatcgattgatcattcaggtc

SEQ ID NO: 4973 - DNA, 21 bp, synthetic construct
  misc_feature 1..21: note = Synthetic construct
  source 1..21: mol_type = other DNA
atcgattgatcattcaggtct

SEQ ID NO: 4974 - DNA, 21 bp, synthetic construct
  misc_feature 1..21: note = Synthetic construct
  source 1..21: mol_type = other DNA
tcgattgatcattcaggtcta

SEQ ID NO: 4975 - DNA, 21 bp, synthetic construct
  misc_feature 1..21: note = Synthetic construct
  source 1..21: mol_type = other DNA
cgattgatcattcaggtctat

SEQ ID NO: 4976 - DNA, 21 bp, synthetic construct
  misc_feature 1..21: note = Synthetic construct
  source 1..21: mol_type = other DNA
gattgatcattcaggtctata

SEQ ID NO: 4977 - DNA, 21 bp, synthetic construct
  misc_feature 1..21: note = Synthetic construct
  source 1..21: mol_type = other DNA
attgatcattcaggtctatac

SEQ ID NO: 4978 - DNA, 21 bp, synthetic construct
  misc_feature 1..21: note = Synthetic construct
  source 1..21: mol_type = other DNA
ttgatcattcaggtctatacc

SEQ ID NO: 4979 - DNA, 21 bp, synthetic construct
  misc_feature 1..21: note = Synthetic construct
  source 1..21: mol_type = other DNA
tgatcattcaggtctatacca

SEQ ID NO: 4980 - DNA, 21 bp, synthetic construct
  misc_feature 1..21: note = Synthetic construct
  source 1..21: mol_type = other DNA
gatcattcaggtctataccaa

SEQ ID NO: 4981 - DNA, 21 bp, synthetic construct
  misc_feature 1..21: note = Synthetic construct
  source 1..21: mol_type = other DNA
atcattcaggtctataccaac

SEQ ID NO: 4982 - DNA, 21 bp, synthetic construct
  misc_feature 1..21: note = Synthetic construct
  source 1..21: mol_type = other DNA
tcattcaggtctataccaacg

SEQ ID NO: 4983 - DNA, 21 bp, synthetic construct
  misc_feature 1..21: note = Synthetic construct
  source 1..21: mol_type = other DNA
cattcaggtctataccaacgg

SEQ ID NO: 4984 - DNA, 21 bp, synthetic construct
  misc_feature 1..21: note = Synthetic construct
  source 1..21: mol_type = other DNA
attcaggtctataccaacgga

SEQ ID NO: 4985 - DNA, 21 bp, synthetic construct
  misc_feature 1..21: note = Synthetic construct
  source 1..21: mol_type = other DNA
ttcaggtctataccaacggat

SEQ ID NO: 4986 - DNA, 21 bp, synthetic construct
  misc_feature 1..21: note = Synthetic construct
  source 1..21: mol_type = other DNA
tcaggtctataccaacggatt

SEQ ID NO: 4987 - DNA, 21 bp, synthetic construct
  misc_feature 1..21: note = Synthetic construct
  source 1..21: mol_type = other DNA
caggtctataccaacggattt

SEQ ID NO: 4988 - DNA, 21 bp, synthetic construct
  misc_feature 1..21: note = Synthetic construct
  source 1..21: mol_type = other DNA
aggtctataccaacggatttg

SEQ ID NO: 4989 - DNA, 21 bp, synthetic construct
  misc_feature 1..21: note = Synthetic construct
  source 1..21: mol_type = other DNA
ggtctataccaacggatttga

SEQ ID NO: 4990 - DNA, 21 bp, synthetic construct
  misc_feature 1..21: note = Synthetic construct
  source 1..21: mol_type = other DNA
gtctataccaacggatttgag

SEQ ID NO: 4991 - DNA, 21 bp, synthetic construct
  misc_feature 1..21: note = Synthetic construct
  source 1..21: mol_type = other DNA
tctataccaacggatttgagc

SEQ ID NO: 4992 - DNA, 21 bp, synthetic construct
  misc_feature 1..21: note = Synthetic construct
  source 1..21: mol_type = other DNA
ctataccaacggatttgagcc

SEQ ID NO: 4993 - DNA, 21 bp, synthetic construct
  misc_feature 1..21: note = Synthetic construct
  source 1..21: mol_type = other DNA
tataccaacggatttgagccg

SEQ ID NO: 4994 - DNA, 21 bp, synthetic construct
  misc_feature 1..21: note = Synthetic construct
  source 1..21: mol_type = other DNA
ataccaacggatttgagccgg

SEQ ID NO: 4995 - DNA, 21 bp, synthetic construct
  misc_feature 1..21: note = Synthetic construct
  source 1..21: mol_type = other DNA
taccaacggatttgagccggc

SEQ ID NO: 4996 - DNA, 21 bp, synthetic construct
  misc_feature 1..21: note = Synthetic construct
  source 1..21: mol_type = other DNA
accaacggatttgagccggcg

SEQ ID NO: 4997 - DNA, 21 bp, synthetic construct
  misc_feature 1..21: note = Synthetic construct
  source 1..21: mol_type = other DNA
ccaacggatttgagccggcgt

SEQ ID NO: 4998 - DNA, 21 bp, synthetic construct
  misc_feature 1..21: note = Synthetic construct
  source 1..21: mol_type = other DNA
caacggatttgagccggcgtc

SEQ ID NO: 4999 - DNA, 21 bp, synthetic construct
  misc_feature 1..21: note = Synthetic construct
  source 1..21: mol_type = other DNA
aacggatttgagccggcgtct

SEQ ID NO: 5000 - DNA, 21 bp, synthetic construct
  misc_feature 1..21: note = Synthetic construct
  source 1..21: mol_type = other DNA
acggatttgagccggcgtctg

SEQ ID NO: 5001 - DNA, 21 bp, synthetic construct
  misc_feature 1..21: note = Synthetic construct
  source 1..21: mol_type = other DNA
cggatttgagccggcgtctga

SEQ ID NO: 5002 - DNA, 21 bp, synthetic construct
  misc_feature 1..21: note = Synthetic construct
  source 1..21: mol_type = other DNA
ggatttgagccggcgtctgat

SEQ ID NO: 5003 - DNA, 21 bp, synthetic construct
  misc_feature 1..21: note = Synthetic construct
  source 1..21: mol_type = other DNA
gatttgagccggcgtctgatg

SEQ ID NO: 5004 - DNA, 21 bp, synthetic construct
  misc_feature 1..21: note = Synthetic construct
  source 1..21: mol_type = other DNA
atttgagccggcgtctgatga

SEQ ID NO: 5005 - DNA, 21 bp, synthetic construct
  misc_feature 1..21: note = Synthetic construct
  source 1..21: mol_type = other DNA
tttgagccggcgtctgatgaa

SEQ ID NO: 5006 - DNA, 21 bp, synthetic construct
  misc_feature 1..21: note = Synthetic construct
  source 1..21: mol_type = other DNA
ttgagccggcgtctgatgaaa

SEQ ID NO: 5007 - DNA, 21 bp, synthetic construct
  misc_feature 1..21: note = Synthetic construct
  source 1..21: mol_type = other DNA
tgagccggcgtctgatgaaag

SEQ ID NO: 5008 - DNA, 21 bp, synthetic construct
  misc_feature 1..21: note = Synthetic construct
  source 1..21: mol_type = other DNA
gagccggcgtctgatgaaagc

SEQ ID NO: 5009 - DNA, 21 bp, synthetic construct
  misc_feature 1..21: note = Synthetic construct
  source 1..21: mol_type = other DNA
agccggcgtctgatgaaagca

SEQ ID NO: 5010 - DNA, 21 bp, synthetic construct
  misc_feature 1..21: note = Synthetic construct
  source 1..21: mol_type = other DNA
gccggcgtctgatgaaagcac

SEQ ID NO: 5011 - DNA, 21 bp, synthetic construct
  misc_feature 1..21: note = Synthetic construct
  source 1..21: mol_type = other DNA
ccggcgtctgatgaaagcacc

SEQ ID NO: 5012 - DNA, 21 bp, synthetic construct
  misc_feature 1..21: note = Synthetic construct
  source 1..21: mol_type = other DNA
cggcgtctgatgaaagcaccg

SEQ ID NO: 5013 - DNA, 21 bp, synthetic construct
  misc_feature 1..21: note = Synthetic construct
  source 1..21: mol_type = other DNA
ggcgtctgatgaaagcaccga

SEQ ID NO: 5014 - DNA, 21 bp, synthetic construct
  misc_feature 1..21: note = Synthetic construct
  source 1..21: mol_type = other DNA
gcgtctgatgaaagcaccgac

SEQ ID NO: 5015 - DNA, 21 bp, synthetic construct
  misc_feature 1..21: note = Synthetic construct
  source 1..21: mol_type = other DNA
cgtctgatgaaagcaccgacc

SEQ ID NO: 5016 - DNA, 21 bp, synthetic construct
  misc_feature 1..21: note = Synthetic construct
  source 1..21: mol_type = other DNA
gtctgatgaaagcaccgaccc

SEQ ID NO: 5017 - DNA, 21 bp, synthetic construct
  misc_feature 1..21: note = Synthetic construct
  source 1..21: mol_type = other DNA
tctgatgaaagcaccgacccc

SEQ ID NO: 5018 - DNA, 21 bp, synthetic construct
  misc_feature 1..21: note = Synthetic construct
  source 1..21: mol_type = other DNA
ctgatgaaagcaccgacccct

SEQ ID NO: 5019 - DNA, 21 bp, synthetic construct
  misc_feature 1..21: note = Synthetic construct
  source 1..21: mol_type = other DNA
tgatgaaagcaccgacccctt

SEQ ID NO: 5020 - DNA, 21 bp, synthetic construct
  misc_feature 1..21: note = Synthetic construct
  source 1..21: mol_type = other DNA
gatgaaagcaccgaccccttt

SEQ ID NO: 5021 - DNA, 21 bp, synthetic construct
  misc_feature 1..21: note = Synthetic construct
  source 1..21: mol_type = other DNA
atgaaagcaccgacccctttc

SEQ ID NO: 5022 - DNA, 21 bp, synthetic construct
  misc_feature 1..21: note = Synthetic construct
  source 1..21: mol_type = other DNA
tgaaagcaccgacccctttct

SEQ ID NO: 5023 - DNA, 21 bp, synthetic construct
  misc_feature 1..21: note = Synthetic construct
  source 1..21: mol_type = other DNA
gaaagcaccgacccctttctg

SEQ ID NO: 5024 - DNA, 21 bp, synthetic construct
  misc_feature 1..21: note = Synthetic construct
  source 1..21: mol_type = other DNA
aaagcaccgacccctttctgg

SEQ ID NO: 5025 - DNA, 21 bp, synthetic construct
  misc_feature 1..21: note = Synthetic construct
  source 1..21: mol_type = other DNA
aagcaccgacccctttctgga

SEQ ID NO: 5026 - DNA, 21 bp, synthetic construct
  misc_feature 1..21: note = Synthetic construct
  source 1..21: mol_type = other DNA
agcaccgacccctttctggag

SEQ ID NO: 5027 - DNA, 21 bp, synthetic construct
  misc_feature 1..21: note = Synthetic construct
  source 1..21: mol_type = other DNA
gcaccgacccctttctggagg

SEQ ID NO: 5028 - DNA, 21 bp, synthetic construct
  misc_feature 1..21: note = Synthetic construct
  source 1..21: mol_type = other DNA
caccgacccctttctggaggt

SEQ ID NO: 5029 - DNA, 21 bp, synthetic construct
  misc_feature 1..21: note = Synthetic construct
  source 1..21: mol_type = other DNA
accgacccctttctggaggta

SEQ ID NO: 5030 - DNA, 21 bp, synthetic construct
  misc_feature 1..21: note = Synthetic construct
  source 1..21: mol_type = other DNA
ccgacccctttctggaggtac

SEQ ID NO: 5031 - DNA, 21 bp, synthetic construct
  misc_feature 1..21: note = Synthetic construct
  source 1..21: mol_type = other DNA
cgacccctttctggaggtaca

SEQ ID NO: 5032 - DNA, 21 bp, synthetic construct
  misc_feature 1..21: note = Synthetic construct
  source 1..21: mol_type = other DNA
gacccctttctggaggtacat

SEQ ID NO: 5033 - DNA, 21 bp, synthetic construct
  misc_feature 1..21: note = Synthetic construct
  source 1..21: mol_type = other DNA
acccctttctggaggtacata

SEQ ID NO: 5034 - DNA, 21 bp, synthetic construct
  misc_feature 1..21: note = Synthetic construct
  source 1..21: mol_type = other DNA
cccctttctggaggtacatat

SEQ ID NO: 5035 - DNA, 21 bp, synthetic construct
  misc_feature 1..21: note = Synthetic construct
  source 1..21: mol_type = other DNA
ccctttctggaggtacatatt

SEQ ID NO: 5036 - DNA, 21 bp, synthetic construct
  misc_feature 1..21: note = Synthetic construct
  source 1..21: mol_type = other DNA
cctttctggaggtacatattc

SEQ ID NO: 5037 - DNA, 21 bp, synthetic construct
  misc_feature 1..21: note = Synthetic construct
  source 1..21: mol_type = other DNA
ctttctggaggtacatattca

SEQ ID NO: 5038 - DNA, 21 bp, synthetic construct
  misc_feature 1..21: note = Synthetic construct
  source 1..21: mol_type = other DNA
tttctggaggtacatattcat

SEQ ID NO: 5039 - DNA, 21 bp, synthetic construct
  misc_feature 1..21: note = Synthetic construct
  source 1..21: mol_type = other DNA
ttctggaggtacatattcata

SEQ ID NO: 5040 - DNA, 21 bp, synthetic construct
  misc_feature 1..21: note = Synthetic construct
  source 1..21: mol_type = other DNA
tctggaggtacatattcatat

SEQ ID NO: 5041 - DNA, 21 bp, synthetic construct
  misc_feature 1..21: note = Synthetic construct
  source 1..21: mol_type = other DNA
ctggaggtacatattcatatc

SEQ ID NO: 5042 - DNA, 21 bp, synthetic construct
  misc_feature 1..21: note = Synthetic construct
  source 1..21: mol_type = other DNA
tggaggtacatattcatatca

SEQ ID NO: 5043 - DNA, 21 bp, synthetic construct
  misc_feature 1..21: note = Synthetic construct
  source 1..21: mol_type = other DNA
ggaggtacatattcatatcag

SEQ ID NO: 5044 - DNA, 21 bp, synthetic construct
  misc_feature 1..21: note = Synthetic construct
  source 1..21: mol_type = other DNA
gaggtacatattcatatcagg

SEQ ID NO: 5045 - DNA, 21 bp, synthetic construct
  misc_feature 1..21: note = Synthetic construct
  source 1..21: mol_type = other DNA
aggtacatattcatatcaggc

SEQ ID NO: 5046 - DNA, 21 bp, synthetic construct
  misc_feature 1..21: note = Synthetic construct
  source 1..21: mol_type = other DNA
ggtacatattcatatcaggct

SEQ ID NO: 5047 - DNA, 21 bp, synthetic construct
  misc_feature 1..21: note = Synthetic construct
  source 1..21: mol_type = other DNA
gtacatattcatatcaggctc

SEQ ID NO: 5048 - DNA, 21 bp, synthetic construct
  misc_feature 1..21: note = Synthetic construct
  source 1..21: mol_type = other DNA
tacatattcatatcaggctcc

SEQ ID NO: 5049 - DNA, 21 bp, synthetic construct
  misc_feature 1..21: note = Synthetic construct
  source 1..21: mol_type = other DNA
acatattcatatcaggctcct

SEQ ID NO: 5050 - DNA, 21 bp, synthetic construct
  misc_feature 1..21: note = Synthetic construct
  source 1..21: mol_type = other DNA
catattcatatcaggctcctt

SEQ ID NO: 5051 - DNA, 21 bp, synthetic construct
  misc_feature 1..21: note = Synthetic construct
  source 1..21: mol_type = other DNA
atattcatatcaggctcctta

SEQ ID NO: 5052 - DNA, 21 bp, synthetic construct
  misc_feature 1..21: note = Synthetic construct
  source 1..21: mol_type = other DNA
tattcatatcaggctccttac

SEQ ID NO: 5053 - DNA, 21 bp, synthetic construct
  misc_feature 1..21: note = Synthetic construct
  source 1..21: mol_type = other DNA
attcatatcaggctccttaca

SEQ ID NO: 5054 - DNA, 21 bp, synthetic construct
  misc_feature 1..21: note = Synthetic construct
  source 1..21: mol_type = other DNA
ttcatatcaggctccttacag

SEQ ID NO: 5055 - DNA, 21 bp, synthetic construct
  misc_feature 1..21: note = Synthetic construct
  source 1..21: mol_type = other DNA
tcatatcaggctccttacagg

SEQ ID NO: 5056 - DNA, 21 bp, synthetic construct
  misc_feature 1..21: note = Synthetic construct
  source 1..21: mol_type = other DNA
catatcaggctccttacaggc

SEQ ID NO: 5057 - DNA, 21 bp, synthetic construct
  misc_feature 1..21: note = Synthetic construct
  source 1..21: mol_type = other DNA
atatcaggctccttacaggca

SEQ ID NO: 5058 - DNA, 21 bp, synthetic construct
  misc_feature 1..21: note = Synthetic construct
  source 1..21: mol_type = other DNA
tatcaggctccttacaggcag

SEQ ID NO: 5059 - DNA, 21 bp, synthetic construct
  misc_feature 1..21: note = Synthetic construct
  source 1..21: mol_type = other DNA
atcaggctccttacaggcagc

SEQ ID NO: 5060 - DNA, 21 bp, synthetic construct
  misc_feature 1..21: note = Synthetic construct
  source 1..21: mol_type = other DNA
tcaggctccttacaggcagcc

SEQ ID NO: 5061 - DNA, 21 bp, synthetic construct
  misc_feature 1..21: note = Synthetic construct
  source 1..21: mol_type = other DNA
caggctccttacaggcagccc

SEQ ID NO: 5062 - DNA, 21 bp, synthetic construct
  misc_feature 1..21: note = Synthetic construct
  source 1..21: mol_type = other DNA
aggctccttacaggcagcccg

SEQ ID NO: 5063 - DNA, 21 bp, synthetic construct
  misc_feature 1..21: note = Synthetic construct
  source 1..21: mol_type = other DNA
ggctccttacaggcagcccga

SEQ ID NO: 5064 - DNA, 21 bp, synthetic construct
  misc_feature 1..21: note = Synthetic construct
  source 1..21: mol_type = other DNA
gctccttacaggcagcccgat

SEQ ID NO: 5065 - DNA, 21 bp, synthetic construct
  misc_feature 1..21: note = Synthetic construct
  source 1..21: mol_type = other DNA
ctccttacaggcagcccgatc

SEQ ID NO: 5066 - DNA, 21 bp, synthetic construct
  misc_feature 1..21: note = Synthetic construct
  source 1..21: mol_type = other DNA
tccttacaggcagcccgatct

SEQ ID NO: 5067 - DNA, 21 bp, synthetic construct
  misc_feature 1..21: note = Synthetic construct
  source 1..21: mol_type = other DNA
ccttacaggcagcccgatcta

SEQ ID NO: 5068 - DNA, 21 bp, synthetic construct
  misc_feature 1..21: note = Synthetic construct
  source 1..21: mol_type = other DNA
cttacaggcagcccgatctat

SEQ ID NO: 5069 - DNA, 21 bp, synthetic construct
  misc_feature 1..21: note = Synthetic construct
  source 1..21: mol_type = other DNA
ttacaggcagcccgatctatt

SEQ ID NO: 5070 - DNA, 21 bp, synthetic construct
  misc_feature 1..21: note = Synthetic construct
  source 1..21: mol_type = other DNA
tacaggcagcccgatctattt

SEQ ID NO: 5071 - DNA, 21 bp, synthetic construct
  misc_feature 1..21: note = Synthetic construct
  source 1..21: mol_type = other DNA
acaggcagcccgatctatttt

SEQ ID NO: 5072 - DNA, 21 bp, synthetic construct
  misc_feature 1..21: note = Synthetic construct
  source 1..21: mol_type = other DNA
caggcagcccgatctatttta

SEQ ID NO: 5073 - DNA, 21 bp, synthetic construct
  misc_feature 1..21: note = Synthetic construct
  source 1..21: mol_type = other DNA
aggcagcccgatctattttat

SEQ ID NO: 5074 - DNA, 21 bp, synthetic construct
  misc_feature 1..21: note = Synthetic construct
  source 1..21: mol_type = other DNA
ggcagcccgatctattttatt

SEQ ID NO: 5075 - DNA, 21 bp, synthetic construct
  misc_feature 1..21: note = Synthetic construct
  source 1..21: mol_type = other DNA
gcagcccgatctattttatta

SEQ ID NO: 5076 - DNA, 21 bp, synthetic construct
  misc_feature 1..21: note = Synthetic construct
  source 1..21: mol_type = other DNA
cagcccgatctattttattat

SEQ ID NO: 5077 - DNA, 21 bp, synthetic construct
  misc_feature 1..21: note = Synthetic construct
  source 1..21: mol_type = other DNA
agcccgatctattttattatt

SEQ ID NO: 5078 - DNA, 21 bp, synthetic construct
  misc_feature 1..21: note = Synthetic construct
  source 1..21: mol_type = other DNA
gcccgatctattttattattc

SEQ ID NO: 5079 - DNA, 21 bp, synthetic construct
  misc_feature 1..21: note = Synthetic construct
  source 1..21: mol_type = other DNA
cccgatctattttattattct

SEQ ID NO: 5080 - DNA, 21 bp, synthetic construct
  misc_feature 1..21: note = Synthetic construct
  source 1..21: mol_type = other DNA
ccgatctattttattattctt

SEQ ID NO: 5081 - DNA, 21 bp, synthetic construct
  misc_feature 1..21: note = Synthetic construct
  source 1..21: mol_type = other DNA
cgatctattttattattcttc

SEQ ID NO: 5082 - DNA, 21 bp, synthetic construct
  misc_feature 1..21: note = Synthetic construct
  source 1..21: mol_type = other DNA
gatctattttattattcttcg

SEQ ID NO: 5083 - DNA, 21 bp, synthetic construct
  misc_feature 1..21: note = Synthetic construct
  source 1..21: mol_type = other DNA
atctattttattattcttcgg

SEQ ID NO: 5084 - DNA, 21 bp, synthetic construct
  misc_feature 1..21: note = Synthetic construct
  source 1..21: mol_type = other DNA
tctattttattattcttcgga

SEQ ID NO: 5085 - DNA, 21 bp, synthetic construct
  misc_feature 1..21: note = Synthetic construct
  source 1..21: mol_type = other DNA
ctattttattattcttcggaa

SEQ ID NO: 5086 - DNA, 21 bp, synthetic construct
  misc_feature 1..21: note = Synthetic construct
  source 1..21: mol_type = other DNA
tattttattattcttcggaac

SEQ ID NO: 5087 - DNA, 21 bp, synthetic construct
  misc_feature 1..21: note = Synthetic construct
  source 1..21: mol_type = other DNA
attttattattcttcggaact

SEQ ID NO: 5088 - DNA, 21 bp, synthetic construct
  misc_feature 1..21: note = Synthetic construct
  source 1..21: mol_type = other DNA
ttttattattcttcggaactg

SEQ ID NO: 5089 - DNA, 21 bp, synthetic construct
  misc_feature 1..21: note = Synthetic construct
  source 1..21: mol_type = other DNA
tttattattcttcggaactgt

SEQ ID NO: 5090 - DNA, 21 bp, synthetic construct
  misc_feature 1..21: note = Synthetic construct
  source 1..21: mol_type = other DNA
ttattattcttcggaactgta

SEQ ID NO: 5091 - DNA, 21 bp, synthetic construct
  misc_feature 1..21: note = Synthetic construct
  source 1..21: mol_type = other DNA
tattattcttcggaactgtaa

SEQ ID NO: 5092 - DNA, 21 bp, synthetic construct
  misc_feature 1..21: note = Synthetic construct
  source 1..21: mol_type = other DNA
attattcttcggaactgtaaa

SEQ ID NO: 5093 - DNA, 21 bp, synthetic construct
  misc_feature 1..21: note = Synthetic construct
  source 1..21: mol_type = other DNA
ttattcttcggaactgtaaac

SEQ ID NO: 5094 - DNA, 21 bp, synthetic construct
  misc_feature 1..21: note = Synthetic construct
  source 1..21: mol_type = other DNA
tattcttcggaactgtaaaca

SEQ ID NO: 5095 - DNA, 21 bp, synthetic construct
  misc_feature 1..21: note = Synthetic construct
  source 1..21: mol_type = other DNA
attcttcggaactgtaaacac

SEQ ID NO: 5096 - DNA, 21 bp, synthetic construct
  misc_feature 1..21: note = Synthetic construct
  source 1..21: mol_type = other DNA
ttcttcggaactgtaaacact

SEQ ID NO: 5097 - DNA, 21 bp, synthetic construct
  misc_feature 1..21: note = Synthetic construct
  source 1..21: mol_type = other DNA
tcttcggaactgtaaacactc

SEQ ID NO: 5098 - DNA, 21 bp, synthetic construct
  misc_feature 1..21: note = Synthetic construct
  source 1..21: mol_type = other DNA
cttcggaactgtaaacactcc

SEQ ID NO: 5099 - DNA, 21 bp, synthetic construct
  misc_feature 1..21: note = Synthetic construct
  source 1..21: mol_type = other DNA
ttcggaactgtaaacactccg

SEQ ID NO: 5100 - DNA, 21 bp, synthetic construct
  misc_feature 1..21: note = Synthetic construct
  source 1..21: mol_type = other DNA
tcggaactgtaaacactccgt

SEQ ID NO: 5101 - DNA, 21 bp, synthetic construct
  misc_feature 1..21: note = Synthetic construct
  source 1..21: mol_type = other DNA
cggaactgtaaacactccgtt

SEQ ID NO: 5102 - DNA, 21 bp, synthetic construct
  misc_feature 1..21: note = Synthetic construct
  source 1..21: mol_type = other DNA
ggaactgtaaacactccgttc

SEQ ID NO: 5103 - DNA, 21 bp, synthetic construct
  misc_feature 1..21: note = Synthetic construct
  source 1..21: mol_type = other DNA
gaactgtaaacactccgttcc

SEQ ID NO: 5104 - DNA, 21 bp, synthetic construct
  misc_feature 1..21: note = Synthetic construct
  source 1..21: mol_type = other DNA
aactgtaaacactccgttccc

SEQ ID NO: 5105 - DNA, 21 bp, synthetic construct
  misc_feature 1..21: note = Synthetic construct
  source 1..21: mol_type = other DNA
actgtaaacactccgttccct

SEQ ID NO: 5106 - DNA, 21 bp, synthetic construct
  misc_feature 1..21: note = Synthetic construct
  source 1..21: mol_type = other DNA
ctgtaaacactccgttcccta

SEQ ID NO: 5107 - DNA, 21 bp, synthetic construct
  misc_feature 1..21: note = Synthetic construct
  source 1..21: mol_type = other DNA
tgtaaacactccgttccctac

SEQ ID NO: 5108 - DNA, 21 bp, synthetic construct
  misc_feature 1..21: note = Synthetic construct
  source 1..21: mol_type = other DNA
gtaaacactccgttccctaca

SEQ ID NO: 5109 - DNA, 21 bp, synthetic construct
  misc_feature 1..21: note = Synthetic construct
  source 1..21: mol_type = other DNA
taaacactccgttccctacaa

SEQ ID NO: 5110 - DNA, 21 bp, synthetic construct
  misc_feature 1..21: note = Synthetic construct
  source 1..21: mol_type = other DNA
aaacactccgttccctacaac

SEQ ID NO: 5111 - DNA, 21 bp, synthetic construct
  misc_feature 1..21: note = Synthetic construct
  source 1..21: mol_type = other DNA
aacactccgttccctacaacg

SEQ ID NO: 5112 - DNA, 21 bp, synthetic construct
  misc_feature 1..21: note = Synthetic construct
  source 1..21: mol_type = other DNA
acactccgttccctacaacga

SEQ ID NO: 5113 - DNA, 21 bp, synthetic construct
  misc_feature 1..21: note = Synthetic construct
  source 1..21: mol_type = other DNA
cactccgttccctacaacgag

SEQ ID NO: 5114 - DNA, 21 bp, synthetic construct
  misc_feature 1..21: note = Synthetic construct
  source 1..21: mol_type = other DNA
actccgttccctacaacgagc

SEQ ID NO: 5115 - DNA, 21 bp, synthetic construct
  misc_feature 1..21: note = Synthetic construct
  source 1..21: mol_type = other DNA
ctccgttccctacaacgagcc

SEQ ID NO: 5116 - DNA, 21 bp, synthetic construct
  misc_feature 1..21: note = Synthetic construct
  source 1..21: mol_type = other DNA
tccgttccctacaacgagcct

SEQ ID NO: 5117 - DNA, 21 bp, synthetic construct
  misc_feature 1..21: note = Synthetic construct
  source 1..21: mol_type = other DNA
ccgttccctacaacgagccta

SEQ ID NO: 5118 - DNA, 21 bp, synthetic construct
  misc_feature 1..21: note = Synthetic construct
  source 1..21: mol_type = other DNA
cgttccctacaacgagcctaa

SEQ ID NO: 5119 - DNA, 21 bp, synthetic construct
  misc_feature 1..21: note = Synthetic construct
  source 1..21: mol_type = other DNA
gttccctacaacgagcctaaa

SEQ ID NO: 5120 - DNA, 21 bp, synthetic construct
  misc_feature 1..21: note = Synthetic construct
  source 1..21: mol_type = other DNA
ttccctacaacgagcctaaat

SEQ ID NO: 5121 - DNA, 21 bp, synthetic construct
  misc_feature 1..21: note = Synthetic construct
  source 1..21: mol_type = other DNA
tccctacaacgagcctaaatt

SEQ ID NO: 5122 - DNA, 21 bp, synthetic construct
  misc_feature 1..21: note = Synthetic construct
  source 1..21: mol_type = other DNA
ccctacaacgagcctaaattc

SEQ ID NO: 5123 - DNA, 21 bp, synthetic construct
  misc_feature 1..21: note = Synthetic construct
  source 1..21: mol_type = other DNA
cctacaacgagcctaaattca

SEQ ID NO: 5124 - DNA, 21 bp, synthetic construct
  misc_feature 1..21: note = Synthetic construct
  source 1..21: mol_type = other DNA
ctacaacgagcctaaattcat

SEQ ID NO: 5125 - DNA, 21 bp, synthetic construct
  misc_feature 1..21: note = Synthetic construct
  source 1..21: mol_type = other DNA
tacaacgagcctaaattcata

SEQ ID NO: 5126 - DNA, 21 bp, synthetic construct
  misc_feature 1..21: note = Synthetic construct
  source 1..21: mol_type = other DNA
acaacgagcctaaattcatat

SEQ ID NO: 5127 - DNA, 21 bp, synthetic construct
  misc_feature 1..21: note = Synthetic construct
  source 1..21: mol_type = other DNA
caacgagcctaaattcatatg

SEQ ID NO: 5128 - DNA, 21 bp, synthetic construct
  misc_feature 1..21: note = Synthetic construct
  source 1..21: mol_type = other DNA
aacgagcctaaattcatatga

SEQ ID NO: 5129 - DNA, 21 bp, synthetic construct
  misc_feature 1..21: note = Synthetic construct
  source 1..21: mol_type = other DNA
acgagcctaaattcatatgac

SEQ ID NO: 5130 - DNA, 21 bp, synthetic construct
  misc_feature 1..21: note = Synthetic construct
  source 1..21: mol_type = other DNA
cgagcctaaattcatatgact

SEQ ID NO: 5131 - DNA, 21 bp, synthetic construct
  misc_feature 1..21: note = Synthetic construct
  source 1..21: mol_type = other DNA
gagcctaaattcatatgactc

SEQ ID NO: 5132 - DNA, 21 bp, synthetic construct
  misc_feature 1..21: note = Synthetic construct
  source 1..21: mol_type = other DNA
agcctaaattcatatgactcg

SEQ ID NO: 5133 - DNA, 21 bp, synthetic construct
  misc_feature 1..21: note = Synthetic construct
  source 1..21: mol_type = other DNA
gcctaaattcatatgactcgt

SEQ ID NO: 5134 - DNA, 21 bp, synthetic construct
  misc_feature 1..21: note = Synthetic construct
  source 1..21: mol_type = other DNA
cctaaattcatatgactcgtt

SEQ ID NO: 5135 - DNA, 21 bp, synthetic construct
  misc_feature 1..21: note = Synthetic construct
  source 1..21: mol_type = other DNA
ctaaattcatatgactcgtta

SEQ ID NO: 5136 - DNA, 21 bp, synthetic construct
  misc_feature 1..21: note = Synthetic construct
  source 1..21: mol_type = other DNA
taaattcatatgactcgttat

SEQ ID NO: 5137 - DNA, 21 bp, synthetic construct
  misc_feature 1..21: note = Synthetic construct
  source 1..21: mol_type = other DNA
aaattcatatgactcgttata

SEQ ID NO: 5138 - DNA, 21 bp, synthetic construct
  misc_feature 1..21: note = Synthetic construct
  source 1..21: mol_type = other DNA
aattcatatgactcgttatag

SEQ ID NO: 5139 - DNA, 21 bp, synthetic construct
  misc_feature 1..21: note = Synthetic construct
  source 1..21: mol_type = other DNA
attcatatgactcgttatagc

SEQ ID NO: 5140 - DNA, 21 bp, synthetic construct
  misc_feature 1..21: note = Synthetic construct
  source 1..21: mol_type = other DNA
ttcatatgactcgttatagcg

SEQ ID NO: 5141 - DNA, 21 bp, synthetic construct
  misc_feature 1..21: note = Synthetic construct
  source 1..21: mol_type = other DNA
tcatatgactcgttatagcgg

SEQ ID NO: 5142 - DNA, 21 bp, synthetic construct
  misc_feature 1..21: note = Synthetic construct
  source 1..21: mol_type = other DNA
catatgactcgttatagcgga

SEQ ID NO: 5143 - DNA, 21 bp, synthetic construct
  misc_feature 1..21: note = Synthetic construct
  source 1..21: mol_type = other DNA
atatgactcgttatagcggac

SEQ ID NO: 5144 - DNA, 21 bp, synthetic construct
  misc_feature 1..21: note = Synthetic construct
  source 1..21: mol_type = other DNA
tatgactcgttatagcggacc

SEQ ID NO: 5145 - DNA, 21 bp, synthetic construct
  misc_feature 1..21: note = Synthetic construct
  source 1..21: mol_type = other DNA
atgactcgttatagcggaccg

SEQ ID NO: 5146 - DNA, 21 bp, synthetic construct
  misc_feature 1..21: note = Synthetic construct
  source 1..21: mol_type = other DNA
tgactcgttatagcggaccgc

SEQ ID NO: 5147 - DNA, 21 bp, synthetic construct
  misc_feature 1..21: note = Synthetic construct
  source 1..21: mol_type = other DNA
gactcgttatagcggaccgcg

SEQ ID NO: 5148 - DNA, 21 bp, synthetic construct
  misc_feature 1..21: note = Synthetic construct
  source 1..21: mol_type = other DNA
actcgttatagcggaccgcgt

SEQ ID NO: 5149 - DNA, 21 bp, synthetic construct
  misc_feature 1..21: note = Synthetic construct
  source 1..21: mol_type = other DNA
ctcgttatagcggaccgcgtg

SEQ ID NO: 5150 - DNA, 21 bp, synthetic construct
  misc_feature 1..21: note = Synthetic construct
  source 1..21: mol_type = other DNA
tcgttatagcggaccgcgtgt

SEQ ID NO: 5151 - DNA, 21 bp, synthetic construct
  misc_feature 1..21: note = Synthetic construct
  source 1..21: mol_type = other DNA
cgttatagcggaccgcgtgtc

SEQ ID NO: 5152 - DNA, 21 bp, synthetic construct
  misc_feature 1..21: note = Synthetic construct
  source 1..21: mol_type = other DNA
gttatagcggaccgcgtgtct

SEQ ID NO: 5153 - DNA, 21 bp, synthetic construct
  misc_feature 1..21: note = Synthetic construct
  source 1..21: mol_type = other DNA
ttatagcggaccgcgtgtctg

SEQ ID NO: 5154 - DNA, 21 bp, synthetic construct
  misc_feature 1..21: note = Synthetic construct
  source 1..21: mol_type = other DNA
tatagcggaccgcgtgtctga

SEQ ID NO: 5155 - DNA, 21 bp, synthetic construct
  misc_feature 1..21: note = Synthetic construct
  source 1..21: mol_type = other DNA
atagcggaccgcgtgtctgat

SEQ ID NO: 5156 - DNA, 21 bp, synthetic construct
  misc_feature 1..21: note = Synthetic construct
  source 1..21: mol_type = other DNA
tagcggaccgcgtgtctgatc

SEQ ID NO: 5157 - DNA, 21 bp, synthetic construct
  misc_feature 1..21: note = Synthetic construct
  source 1..21: mol_type = other DNA
agcggaccgcgtgtctgatcc

SEQ ID NO: 5158 - DNA, 21 bp, synthetic construct
  misc_feature 1..21: note = Synthetic construct
  source 1..21: mol_type = other DNA
gcggaccgcgtgtctgatcca

SEQ ID NO: 5159 - DNA, 21 bp, synthetic construct
  misc_feature 1..21: note = Synthetic construct
  source 1..21: mol_type = other DNA
cggaccgcgtgtctgatccac

SEQ ID NO: 5160 - DNA, 21 bp, synthetic construct
  misc_feature 1..21: note = Synthetic construct
  source 1..21: mol_type = other DNA
ggaccgcgtgtctgatccacg

SEQ ID NO: 5161 - DNA, 21 bp, synthetic construct
  misc_feature 1..21: note = Synthetic construct
  source 1..21: mol_type = other DNA
gaccgcgtgtctgatccacgg

SEQ ID NO: 5162 - DNA, 21 bp, synthetic construct
  misc_feature 1..21: note = Synthetic construct
  source 1..21: mol_type = other DNA
accgcgtgtctgatccacggc

SEQ ID NO: 5163 - DNA, 21 bp, synthetic construct
  misc_feature 1..21: note = Synthetic construct
  source 1..21: mol_type = other DNA
ccgcgtgtctgatccacggcg

SEQ ID NO: 5164 - DNA, 21 bp, synthetic construct
  misc_feature 1..21: note = Synthetic construct
  source 1..21: mol_type = other DNA
cgcgtgtctgatccacggcgc

SEQ ID NO: 5165 - DNA, 21 bp, synthetic construct
  misc_feature 1..21: note = Synthetic construct
  source 1..21: mol_type = other DNA
gcgtgtctgatccacggcgca

SEQ ID NO: 5166 - DNA, 21 bp, synthetic construct
  misc_feature 1..21: note = Synthetic construct
  source 1..21: mol_type = other DNA
cgtgtctgatccacggcgcac

SEQ ID NO: 5167 - DNA, 21 bp, synthetic construct
  misc_feature 1..21: note = Synthetic construct
  source 1..21: mol_type = other DNA
gtgtctgatccacggcgcaca

SEQ ID NO: 5168 - DNA, 21 bp, synthetic construct
  misc_feature 1..21: note = Synthetic construct
  source 1..21: mol_type = other DNA
tgtctgatccacggcgcacat

SEQ ID NO: 5169 - DNA, 21 bp, synthetic construct
  misc_feature 1..21: note = Synthetic construct
  source 1..21: mol_type = other DNA
gtctgatccacggcgcacatt

SEQ ID NO: 5170 - DNA, 21 bp, synthetic construct
  misc_feature 1..21: note = Synthetic construct
  source 1..21: mol_type = other DNA
tctgatccacggcgcacattg

SEQ ID NO: 5171 - DNA, 21 bp, synthetic construct
  misc_feature 1..21: note = Synthetic construct
  source 1..21: mol_type = other DNA
ctgatccacggcgcacattgg

SEQ ID NO: 5172 - DNA, 21 bp, synthetic construct
  misc_feature 1..21: note = Synthetic construct
  source 1..21: mol_type = other DNA
tgatccacggcgcacattggt

SEQ ID NO: 5173 - DNA, 21 bp, synthetic construct
  misc_feature 1..21: note = Synthetic construct
  source 1..21: mol_type = other DNA
gatccacggcgcacattggtc

SEQ ID NO: 5174 - DNA, 21 bp, synthetic construct
  misc_feature 1..21: note = Synthetic construct
  source 1..21: mol_type = other DNA
atccacggcgcacattggtct

SEQ ID NO: 5175 - DNA, 21 bp, synthetic construct
  misc_feature 1..21: note = Synthetic construct
  source 1..21: mol_type = other DNA
tccacggcgcacattggtctc

SEQ ID NO: 5176 - DNA, 21 bp, synthetic construct
  misc_feature 1..21: note = Synthetic construct
  source 1..21: mol_type = other DNA
ccacggcgcacattggtctcg

SEQ ID NO: 5177 - DNA, 21 bp, synthetic construct
  misc_feature 1..21: note = Synthetic construct
  source 1..21: mol_type = other DNA
cacggcgcacattggtctcgg

SEQ ID NO: 5178 - DNA, 21 bp, synthetic construct
  misc_feature 1..21: note = Synthetic construct
  source 1..21: mol_type = other DNA
acggcgcacattggtctcgga

SEQ ID NO: 5179 - DNA, 21 bp, synthetic construct
  misc_feature 1..21: note = Synthetic construct
  source 1..21: mol_type = other DNA
cggcgcacattggtctcggac

SEQ ID NO: 5180 - DNA, 21 bp, synthetic construct
  misc_feature 1..21: note = Synthetic construct
  source 1..21: mol_type = other DNA
ggcgcacattggtctcggacc

SEQ ID NO: 5181 - DNA, 21 bp, synthetic construct
  misc_feature 1..21: note = Synthetic construct
  source 1..21: mol_type = other DNA
gcgcacattggtctcggacca

SEQ ID NO: 5182 - DNA, 21 bp, synthetic construct
  misc_feature 1..21: note = Synthetic construct
  source 1..21: mol_type = other DNA
cgcacattggtctcggaccaa

SEQ ID NO: 5183 - DNA, 21 bp, synthetic construct
  misc_feature 1..21: note = Synthetic construct
  source 1..21: mol_type = other DNA
gcacattggtctcggaccaat

SEQ ID NO: 5184 - DNA, 21 bp, synthetic construct
  misc_feature 1..21: note = Synthetic construct
  source 1..21: mol_type = other DNA
cacattggtctcggaccaata

SEQ ID NO: 5185 - DNA, 21 bp, synthetic construct
  misc_feature 1..21: note = Synthetic construct
  source 1..21: mol_type = other DNA
acattggtctcggaccaatag

SEQ ID NO: 5186 - DNA, 21 bp, synthetic construct
  misc_feature 1..21: note = Synthetic construct
  source 1..21: mol_type = other DNA
cattggtctcggaccaataga

SEQ ID NO: 5187 - DNA, 21 bp, synthetic construct
  misc_feature 1..21: note = Synthetic construct
  source 1..21: mol_type = other DNA
attggtctcggaccaatagag

SEQ ID NO: 5188 - DNA, 21 bp, synthetic construct
  misc_feature 1..21: note = Synthetic construct
  source 1..21: mol_type = other DNA
ttggtctcggaccaatagagc

SEQ ID NO: 5189 - DNA, 21 bp, synthetic construct
  misc_feature 1..21: note = Synthetic construct
  source 1..21: mol_type = other DNA
tggtctcggaccaatagagcc

SEQ ID NO: 5190 - DNA, 21 bp, synthetic construct
  misc_feature 1..21: note = Synthetic construct
  source 1..21: mol_type = other DNA
ggtctcggaccaatagagccg

SEQ ID NO: 5191 - DNA, 21 bp, synthetic construct
  misc_feature 1..21: note = Synthetic construct
  source 1..21: mol_type = other DNA
gtctcggaccaatagagccgc

SEQ ID NO: 5192 - DNA, 21 bp, synthetic construct
  misc_feature 1..21: note = Synthetic construct
  source 1..21: mol_type = other DNA
tctcggaccaatagagccgct

SEQ ID NO: 5193 - DNA, 21 bp, synthetic construct
  misc_feature 1..21: note = Synthetic construct
  source 1..21: mol_type = other DNA
ctcggaccaatagagccgctc

SEQ ID NO: 5194 - DNA, 21 bp, synthetic construct
  misc_feature 1..21: note = Synthetic construct
  source 1..21: mol_type = other DNA
tcggaccaatagagccgctct

SEQ ID NO: 5195 - DNA, 21 bp, synthetic construct
  misc_feature 1..21: note = Synthetic construct
  source 1..21: mol_type = other DNA
cggaccaatagagccgctctc

SEQ ID NO: 5196 - DNA, 21 bp, synthetic construct
  misc_feature 1..21: note = Synthetic construct
  source 1..21: mol_type = other DNA
ggaccaatagagccgctctca

SEQ ID NO: 5197 - DNA, 21 bp, synthetic construct
  misc_feature 1..21: note = Synthetic construct
  source 1..21: mol_type = other DNA
gaccaatagagccgctctcag

SEQ ID NO: 5198 - DNA, 21 bp, synthetic construct
  misc_feature 1..21: note = Synthetic construct
  source 1..21: mol_type = other DNA
accaatagagccgctctcaga

SEQ ID NO: 5199 - DNA, 21 bp, synthetic construct
  misc_feature 1..21: note = Synthetic construct
  source 1..21: mol_type = other DNA
ccaatagagccgctctcagag

SEQ ID NO: 5200 - DNA, 21 bp, synthetic construct
  misc_feature 1..21: note = Synthetic construct
  source 1..21: mol_type = other DNA
caatagagccgctctcagagc

SEQ ID NO: 5201 - DNA, 21 bp, synthetic construct
  misc_feature 1..21: note = Synthetic construct
  source 1..21: mol_type = other DNA
aatagagccgctctcagagcg

SEQ ID NO: 5202 - DNA, 21 bp, synthetic construct
  misc_feature 1..21: note = Synthetic construct
  source 1..21: mol_type = other DNA
atagagccgctctcagagcgc

SEQ ID NO: 5203 - DNA, 21 bp, synthetic construct
  misc_feature 1..21: note = Synthetic construct
  source 1..21: mol_type = other DNA
tagagccgctctcagagcgcg

SEQ ID NO: 5204 - DNA, 21 bp, synthetic construct
  misc_feature 1..21: note = Synthetic construct
  source 1..21: mol_type = other DNA
agagccgctctcagagcgcgg

SEQ ID NO: 5205 - DNA, 21 bp, synthetic construct
  misc_feature 1..21: note = Synthetic construct
  source 1..21: mol_type = other DNA
gagccgctctcagagcgcggg

SEQ ID NO: 5206 - DNA, 21 bp, synthetic construct
  misc_feature 1..21: note = Synthetic construct
  source 1..21: mol_type = other DNA
agccgctctcagagcgcgggg

SEQ ID NO: 5207 - DNA, 21 bp, synthetic construct
  misc_feature 1..21: note = Synthetic construct
  source 1..21: mol_type = other DNA
gccgctctcagagcgcggggg

SEQ ID NO: 5208 - DNA, 21 bp, synthetic construct
  misc_feature 1..21: note = Synthetic construct
  source 1..21: mol_type = other DNA
ccgctctcagagcgcgggggg

SEQ ID NO: 5209 - DNA, 21 bp, synthetic construct
  misc_feature 1..21: note = Synthetic construct
  source 1..21: mol_type = other DNA
cgctctcagagcgcggggggt

SEQ ID NO: 5210 - DNA, 21 bp, synthetic construct
  misc_feature 1..21: note = Synthetic construct
  source 1..21: mol_type = other DNA
gctctcagagcgcggggggta

SEQ ID NO: 5211 - DNA, 21 bp, synthetic construct
  misc_feature 1..21: note = Synthetic construct
  source 1..21: mol_type = other DNA
ctctcagagcgcggggggtaa

SEQ ID NO: 5212 - DNA, 21 bp, synthetic construct
  misc_feature 1..21: note = Synthetic construct
  source 1..21: mol_type = other DNA
tctcagagcgcggggggtaac

SEQ ID NO: 5213 - DNA, 21 bp, synthetic construct
  misc_feature 1..21: note = Synthetic construct
  source 1..21: mol_type = other DNA
ctcagagcgcggggggtaacg

SEQ ID NO: 5214 - DNA, 21 bp, synthetic construct
  misc_feature 1..21: note = Synthetic construct
  source 1..21: mol_type = other DNA
tcagagcgcggggggtaacgg

SEQ ID NO: 5215 - DNA, 21 bp, synthetic construct
  misc_feature 1..21: note = Synthetic construct
  source 1..21: mol_type = other DNA
cagagcgcggggggtaacggt

SEQ ID NO: 5216 - DNA, 21 bp, synthetic construct
  misc_feature 1..21: note = Synthetic construct
  source 1..21: mol_type = other DNA
agagcgcggggggtaacggtt

SEQ ID NO: 5217 - DNA, 21 bp, synthetic construct
  misc_feature 1..21: note = Synthetic construct
  source 1..21: mol_type = other DNA
gagcgcggggggtaacggttg

SEQ ID NO: 5218 - DNA, 21 bp, synthetic construct
  misc_feature 1..21: note = Synthetic construct
  source 1..21: mol_type = other DNA
agcgcggggggtaacggttgc

SEQ ID NO: 5219 - DNA, 21 bp, synthetic construct
  misc_feature 1..21: note = Synthetic construct
  source 1..21: mol_type = other DNA
gcgcggggggtaacggttgct

SEQ ID NO: 5220 - DNA, 21 bp, synthetic construct
  misc_feature 1..21: note = Synthetic construct
  source 1..21: mol_type = other DNA
cgcggggggtaacggttgctt

SEQ ID NO: 5221 - DNA, 21 bp, synthetic construct
  misc_feature 1..21: note = Synthetic construct
  source 1..21: mol_type = other DNA
gcggggggtaacggttgcttg

SEQ ID NO: 5222 - DNA, 21 bp, synthetic construct
  misc_feature 1..21: note = Synthetic construct
  source 1..21: mol_type = other DNA
cggggggtaacggttgcttgt

SEQ ID NO: 5223 - DNA, 21 bp, synthetic construct
  misc_feature 1..21: note = Synthetic construct
  source 1..21: mol_type = other DNA
ggggggtaacggttgcttgtt

SEQ ID NO: 5224 - DNA, 21 bp, synthetic construct
  misc_feature 1..21: note = Synthetic construct
  source 1..21: mol_type = other DNA
gggggtaacggttgcttgttc

SEQ ID NO: 5225 - DNA, 21 bp, synthetic construct
  misc_feature 1..21: note = Synthetic construct
  source 1..21: mol_type = other DNA
ggggtaacggttgcttgttca

SEQ ID NO: 5226 - DNA, 21 bp, synthetic construct
  misc_feature 1..21: note = Synthetic construct
  source 1..21: mol_type = other DNA
gggtaacggttgcttgttcag

SEQ ID NO: 5227 - DNA, 21 bp, synthetic construct
  misc_feature 1..21: note = Synthetic construct
  source 1..21: mol_type = other DNA
ggtaacggttgcttgttcagc

SEQ ID NO: 5228 - DNA, 21 bp, synthetic construct
  misc_feature 1..21: note = Synthetic construct
  source 1..21: mol_type = other DNA
gtaacggttgcttgttcagcg

SEQ ID NO: 5229 - DNA, 21 bp, synthetic construct
  misc_feature 1..21: note = Synthetic construct
  source 1..21: mol_type = other DNA
taacggttgcttgttcagcga

SEQ ID NO: 5230 - DNA, 21 bp, synthetic construct
  misc_feature 1..21: note = Synthetic construct
  source 1..21: mol_type = other DNA
aacggttgcttgttcagcgaa

SEQ ID NO: 5231 - DNA, 21 bp, synthetic construct
  misc_feature 1..21: note = Synthetic construct
  source 1..21: mol_type = other DNA
acggttgcttgttcagcgaac

SEQ ID NO: 5232 - DNA, 21 bp, synthetic construct
  misc_feature 1..21: note = Synthetic construct
  source 1..21: mol_type = other DNA
cggttgcttgttcagcgaact

SEQ ID NO: 5233 - DNA, 21 bp, synthetic construct
  misc_feature 1..21: note = Synthetic construct
  source 1..21: mol_type = other DNA
ggttgcttgttcagcgaactt

SEQ ID NO: 5234 - DNA, 21 bp, synthetic construct
  misc_feature 1..21: note = Synthetic construct
  source 1..21: mol_type = other DNA
gttgcttgttcagcgaacttc

SEQ ID NO: 5235 - DNA, 21 bp, synthetic construct
  misc_feature 1..21: note = Synthetic construct
  source 1..21: mol_type = other DNA
ttgcttgttcagcgaacttct

SEQ ID NO: 5236 - DNA, 21 bp, synthetic construct
  misc_feature 1..21: note = Synthetic construct
  source 1..21: mol_type = other DNA
tgcttgttcagcgaacttctt

SEQ ID NO: 5237 - DNA, 21 bp, synthetic construct
  misc_feature 1..21: note = Synthetic construct
  source 1..21: mol_type = other DNA
gcttgttcagcgaacttcttg

SEQ ID NO: 5238 - DNA, 21 bp, synthetic construct
  misc_feature 1..21: note = Synthetic construct
  source 1..21: mol_type = other DNA
cttgttcagcgaacttcttgt

SEQ ID NO: 5239 - DNA, 21 bp, synthetic construct
  misc_feature 1..21: note = Synthetic construct
  source 1..21: mol_type = other DNA
ttgttcagcgaacttcttgta

SEQ ID NO: 5240 - DNA, 21 bp, synthetic construct
  misc_feature 1..21: note = Synthetic construct
  source 1..21: mol_type = other DNA
tgttcagcgaacttcttgtaa

SEQ ID NO: 5241 - DNA, 21 bp, synthetic construct
  misc_feature 1..21: note = Synthetic construct
  source 1..21: mol_type = other DNA
gttcagcgaacttcttgtaag

SEQ ID NO: 5242 - DNA, 21 bp, synthetic construct
  misc_feature 1..21: note = Synthetic construct
  source 1..21: mol_type = other DNA
ttcagcgaacttcttgtaagg

SEQ ID NO: 5243 - DNA, 21 bp, synthetic construct
  misc_feature 1..21: note = Synthetic construct
  source 1..21: mol_type = other DNA
tcagcgaacttcttgtaaggc

SEQ ID NO: 5244 - DNA, 21 bp, synthetic construct
  misc_feature 1..21: note = Synthetic construct
  source 1..21: mol_type = other DNA
cagcgaacttcttgtaaggcg

SEQ ID NO: 5245 - DNA, 21 bp, synthetic construct
  misc_feature 1..21: note = Synthetic construct
  source 1..21: mol_type = other DNA
agcgaacttcttgtaaggcgc

SEQ ID NO: 5246 - DNA, 21 bp, synthetic construct
  misc_feature 1..21: note = Synthetic construct
  source 1..21: mol_type = other DNA
gcgaacttcttgtaaggcgct

SEQ ID NO: 5247 - DNA, 21 bp, synthetic construct
  misc_feature 1..21: note = Synthetic construct
  source 1..21: mol_type = other DNA
cgaacttcttgtaaggcgctg

SEQ ID NO: 5248 - DNA, 21 bp, synthetic construct
  misc_feature 1..21: note = Synthetic construct
  source 1..21: mol_type = other DNA
gaacttcttgtaaggcgctgc

SEQ ID NO: 5249 - DNA, 21 bp, synthetic construct
  misc_feature 1..21: note = Synthetic construct
  source 1..21: mol_type = other DNA
aacttcttgtaaggcgctgca

SEQ ID NO: 5250 - DNA, 21 bp, synthetic construct
  misc_feature 1..21: note = Synthetic construct
  source 1..21: mol_type = other DNA
acttcttgtaaggcgctgcat

SEQ ID NO: 5251 - DNA, 21 bp, synthetic construct
  misc_feature 1..21: note = Synthetic construct
  source 1..21: mol_type = other DNA
cttcttgtaaggcgctgcatc

SEQ ID NO: 5252 - DNA, 21 bp, synthetic construct
  misc_feature 1..21: note = Synthetic construct
  source 1..21: mol_type = other DNA
ttcttgtaaggcgctgcatcc

SEQ ID NO: 5253 - DNA, 21 bp, synthetic construct
  misc_feature 1..21: note = Synthetic construct
  source 1..21: mol_type = other DNA
tcttgtaaggcgctgcatcct

SEQ ID NO: 5254 - DNA, 21 bp, synthetic construct
  misc_feature 1..21: note = Synthetic construct
  source 1..21: mol_type = other DNA
cttgtaaggcgctgcatcctg

SEQ ID NO: 5255 - DNA, 21 bp, synthetic construct
  misc_feature 1..21: note = Synthetic construct
  source 1..21: mol_type = other DNA
ttgtaaggcgctgcatcctgc

SEQ ID NO: 5256 - DNA, 21 bp, synthetic construct
  misc_feature 1..21: note = Synthetic construct
  source 1..21: mol_type = other DNA
tgtaaggcgctgcatcctgca

SEQ ID NO: 5257 - DNA, 21 bp, synthetic construct
  misc_feature 1..21: note = Synthetic construct
  source 1..21: mol_type = other DNA
gtaaggcgctgcatcctgcaa

SEQ ID NO: 5258 - DNA, 21 bp, synthetic construct
  misc_feature 1..21: note = Synthetic construct
  source 1..21: mol_type = other DNA
taaggcgctgcatcctgcaac

SEQ ID NO: 5259 - DNA, 21 bp, synthetic construct
  misc_feature 1..21: note = Synthetic construct
  source 1..21: mol_type = other DNA
aaggcgctgcatcctgcaact

SEQ ID NO: 5260 - DNA, 21 bp, synthetic construct
  misc_feature 1..21: note = Synthetic construct
  source 1..21: mol_type = other DNA
aggcgctgcatcctgcaactt

SEQ ID NO: 5261 - DNA, 21 bp, synthetic construct
  misc_feature 1..21: note = Synthetic construct
  source 1..21: mol_type = other DNA
ggcgctgcatcctgcaacttg

SEQ ID NO: 5262 - DNA, 21 bp, synthetic construct
  misc_feature 1..21: note = Synthetic construct
  source 1..21: mol_type = other DNA
gcgctgcatcctgcaacttgt

SEQ ID NO: 5263 - DNA, 21 bp, synthetic construct
  misc_feature 1..21: note = Synthetic construct
  source 1..21: mol_type = other DNA
cgctgcatcctgcaacttgtg

SEQ ID NO: 5264 - DNA, 21 bp, synthetic construct
  misc_feature 1..21: note = Synthetic construct
  source 1..21: mol_type = other DNA
gctgcatcctgcaacttgtgc

SEQ ID NO: 5265 - DNA, 21 bp, synthetic construct
  misc_feature 1..21: note = Synthetic construct
  source 1..21: mol_type = other DNA
ctgcatcctgcaacttgtgcc

SEQ ID NO: 5266 - DNA, 21 bp, synthetic construct
  misc_feature 1..21: note = Synthetic construct
  source 1..21: mol_type = other DNA
tgcatcctgcaacttgtgccc

SEQ ID NO: 5267 - DNA, 21 bp, synthetic construct
  misc_feature 1..21: note = Synthetic construct
  source 1..21: mol_type = other DNA
gcatcctgcaacttgtgcccc

SEQ ID NO: 5268 - DNA, 21 bp, synthetic construct
  misc_feature 1..21: note = Synthetic construct
  source 1..21: mol_type = other DNA
catcctgcaacttgtgcccca

SEQ ID NO: 5269 - DNA, 21 bp, synthetic construct
  misc_feature 1..21: note = Synthetic construct
  source 1..21: mol_type = other DNA
atcctgcaacttgtgccccat

SEQ ID NO: 5270 - DNA, 21 bp, synthetic construct
  misc_feature 1..21: note = Synthetic construct
  source 1..21: mol_type = other DNA
tcctgcaacttgtgccccata

SEQ ID NO: 5271 - DNA, 21 bp, synthetic construct
  misc_feature 1..21: note = Synthetic construct
  source 1..21: mol_type = other DNA
cctgcaacttgtgccccatag

SEQ ID NO: 5272 - DNA, 21 bp, synthetic construct
  misc_feature 1..21: note = Synthetic construct
  source 1..21: mol_type = other DNA
ctgcaacttgtgccccatagg

SEQ ID NO: 5273 - DNA, 21 bp, synthetic construct
  misc_feature 1..21: note = Synthetic construct
  source 1..21: mol_type = other DNA
tgcaacttgtgccccatagga

SEQ ID NO: 5274 - DNA, 21 bp, synthetic construct
  misc_feature 1..21: note = Synthetic construct
  source 1..21: mol_type = other DNA
gcaacttgtgccccataggag

SEQ ID NO: 5275 - DNA, 21 bp, synthetic construct
  misc_feature 1..21: note = Synthetic construct
  source 1..21: mol_type = other DNA
caacttgtgccccataggagc

SEQ ID NO: 5276 - DNA, 21 bp, synthetic construct
  misc_feature 1..21: note = Synthetic construct
  source 1..21: mol_type = other DNA
aacttgtgccccataggagca

SEQ ID NO: 5277 - DNA, 21 bp, synthetic construct
  misc_feature 1..21: note = Synthetic construct
  source 1..21: mol_type = other DNA
acttgtgccccataggagcac

SEQ ID NO: 5278 - DNA, 21 bp, synthetic construct
  misc_feature 1..21: note = Synthetic construct
  source 1..21: mol_type = other DNA
cttgtgccccataggagcacc

SEQ ID NO: 5279 - DNA, 21 bp, synthetic construct
  misc_feature 1..21: note = Synthetic construct
  source 1..21: mol_type = other DNA
ttgtgccccataggagcaccg

SEQ ID NO: 5280 - DNA, 21 bp, synthetic construct
  misc_feature 1..21: note = Synthetic construct
  source 1..21: mol_type = other DNA
tgtgccccataggagcaccgt

SEQ ID NO: 5281 - DNA, 21 bp, synthetic construct
  misc_feature 1..21: note = Synthetic construct
  source 1..21: mol_type = other DNA
gtgccccataggagcaccgtt

SEQ ID NO: 5282 - DNA, 21 bp, synthetic construct
  misc_feature 1..21: note = Synthetic construct
  source 1..21: mol_type = other DNA
tgccccataggagcaccgttg

SEQ ID NO: 5283 - DNA, 21 bp, synthetic construct
  misc_feature 1..21: note = Synthetic construct
  source 1..21: mol_type = other DNA
gccccataggagcaccgttgg

SEQ ID NO: 5284 - DNA, 21 bp, synthetic construct
  misc_feature 1..21: note = Synthetic construct
  source 1..21: mol_type = other DNA
ccccataggagcaccgttgga

SEQ ID NO: 5285 - DNA, 21 bp, synthetic construct
  misc_feature 1..21: note = Synthetic construct
  source 1..21: mol_type = other DNA
cccataggagcaccgttggag

SEQ ID NO: 5286 - DNA, 21 bp, synthetic construct
  misc_feature 1..21: note = Synthetic construct
  source 1..21: mol_type = other DNA
ccataggagcaccgttggaga

SEQ ID NO: 5287 - DNA, 21 bp, synthetic construct
  misc_feature 1..21: note = Synthetic construct
  source 1..21: mol_type = other DNA
cataggagcaccgttggagaa

SEQ ID NO: 5288 - DNA, 21 bp, synthetic construct
  misc_feature 1..21: note = Synthetic construct
  source 1..21: mol_type = other DNA
ataggagcaccgttggagaac

SEQ ID NO: 5289 - DNA, 21 bp, synthetic construct
  misc_feature 1..21: note = Synthetic construct
  source 1..21: mol_type = other DNA
taggagcaccgttggagaacg

SEQ ID NO: 5290 - DNA, 21 bp, synthetic construct
  misc_feature 1..21: note = Synthetic construct
  source 1..21: mol_type = other DNA
aggagcaccgttggagaacgt

SEQ ID NO: 5291 - DNA, 21 bp, synthetic construct
  misc_feature 1..21: note = Synthetic construct
  source 1..21: mol_type = other DNA
ggagcaccgttggagaacgtg

SEQ ID NO: 5292 - DNA, 21 bp, synthetic construct
  misc_feature 1..21: note = Synthetic construct
  source 1..21: mol_type = other DNA
gagcaccgttggagaacgtgc

SEQ ID NO: 5293 - DNA, 21 bp, synthetic construct
  misc_feature 1..21: note = Synthetic construct
  source 1..21: mol_type = other DNA
agcaccgttggagaacgtgca

SEQ ID NO: 5294 - DNA, 21 bp, synthetic construct
  misc_feature 1..21: note = Synthetic construct
  source 1..21: mol_type = other DNA
gcaccgttggagaacgtgcat

SEQ ID NO: 5295 - DNA, 21 bp, synthetic construct
  misc_feature 1..21: note = Synthetic construct
  source 1..21: mol_type = other DNA
caccgttggagaacgtgcatt

SEQ ID NO: 5296 - DNA, 21 bp, synthetic construct
  misc_feature 1..21: note = Synthetic construct
  source 1..21: mol_type = other DNA
accgttggagaacgtgcattg

SEQ ID NO: 5297 - DNA, 21 bp, synthetic construct
  misc_feature 1..21: note = Synthetic construct
  source 1..21: mol_type = other DNA
ccgttggagaacgtgcattgc

SEQ ID NO: 5298 - DNA, 21 bp, synthetic construct
  misc_feature 1..21: note = Synthetic construct
  source 1..21: mol_type = other DNA
cgttggagaacgtgcattgcc

SEQ ID NO: 5299 - DNA, 21 bp, synthetic construct
  misc_feature 1..21: note = Synthetic construct
  source 1..21: mol_type = other DNA
gttggagaacgtgcattgccc

SEQ ID NO: 5300 - DNA, 21 bp, synthetic construct
  misc_feature 1..21: note = Synthetic construct
  source 1..21: mol_type = other DNA
ttggagaacgtgcattgccca

SEQ ID NO: 5301 - DNA, 21 bp, synthetic construct
  misc_feature 1..21: note = Synthetic construct
  source 1..21: mol_type = other DNA
tggagaacgtgcattgcccaa

SEQ ID NO: 5302 - DNA, 21 bp, synthetic construct
  misc_feature 1..21: note = Synthetic construct
  source 1..21: mol_type = other DNA
ggagaacgtgcattgcccaaa

SEQ ID NO: 5303 - DNA, 21 bp, synthetic construct
  misc_feature 1..21: note = Synthetic construct
  source 1..21: mol_type = other DNA
gagaacgtgcattgcccaaac

SEQ ID NO: 5304 - DNA, 21 bp, synthetic construct
  misc_feature 1..21: note = Synthetic construct
  source 1..21: mol_type = other DNA
agaacgtgcattgcccaaaca

SEQ ID NO: 5305 - DNA, 21 bp, synthetic construct
  misc_feature 1..21: note = Synthetic construct
  source 1..21: mol_type = other DNA
gaacgtgcattgcccaaacaa

SEQ ID NO: 5306 - DNA, 21 bp, synthetic construct
  misc_feature 1..21: note = Synthetic construct
  source 1..21: mol_type = other DNA
aacgtgcattgcccaaacaac

SEQ ID NO: 5307 - DNA, 21 bp, synthetic construct
  misc_feature 1..21: note = Synthetic construct
  source 1..21: mol_type = other DNA
acgtgcattgcccaaacaacg

SEQ ID NO: 5308 - DNA, 21 bp, synthetic construct
  misc_feature 1..21: note = Synthetic construct
  source 1..21: mol_type = other DNA
cgtgcattgcccaaacaacga

SEQ ID NO: 5309 - DNA, 21 bp, synthetic construct
  misc_feature 1..21: note = Synthetic construct
  source 1..21: mol_type = other DNA
gtgcattgcccaaacaacgac

SEQ ID NO: 5310 - DNA, 21 bp, synthetic construct
  misc_feature 1..21: note = Synthetic construct
  source 1..21: mol_type = other DNA
tgcattgcccaaacaacgacg

SEQ ID NO: 5311 - DNA, 21 bp, synthetic construct
  misc_feature 1..21: note = Synthetic construct
  source 1..21: mol_type = other DNA
gcattgcccaaacaacgacga

SEQ ID NO: 5312 - DNA, 21 bp, synthetic construct
  misc_feature 1..21: note = Synthetic construct
  source 1..21: mol_type = other DNA
cattgcccaaacaacgacgat

SEQ ID NO: 5313 - DNA, 21 bp, synthetic construct
  misc_feature 1..21: note = Synthetic construct
  source 1..21: mol_type = other DNA
attgcccaaacaacgacgatc

SEQ ID NO: 5314 - DNA, 21 bp, synthetic construct
  misc_feature 1..21: note = Synthetic construct
  source 1..21: mol_type = other DNA
ttgcccaaacaacgacgatcg

SEQ ID NO: 5315 - DNA, 21 bp, synthetic construct
  misc_feature 1..21: note = Synthetic construct
  source 1..21: mol_type = other DNA
tgcccaaacaacgacgatcgg

SEQ ID NO: 5316 - DNA, 21 bp, synthetic construct
  misc_feature 1..21: note = Synthetic construct
  source 1..21: mol_type = other DNA
gcccaaacaacgacgatcggt

SEQ ID NO: 5317 - DNA, 21 bp, synthetic construct
  misc_feature 1..21: note = Synthetic construct
  source 1..21: mol_type = other DNA
cccaaacaacgacgatcggta

SEQ ID NO: 5318 - DNA, 21 bp, synthetic construct
  misc_feature 1..21: note = Synthetic construct
  source 1..21: mol_type = other DNA
ccaaacaacgacgatcggtag

SEQ ID NO: 5319 - DNA, 21 bp, synthetic construct
  misc_feature 1..21: note = Synthetic construct
  source 1..21: mol_type = other DNA
caaacaacgacgatcggtagc

SEQ ID NO: 5320 - DNA, 21 bp, synthetic construct
  misc_feature 1..21: note = Synthetic construct
  source 1..21: mol_type = other DNA
aaacaacgacgatcggtagcc

SEQ ID NO: 5321 - DNA, 21 bp, synthetic construct
  misc_feature 1..21: note = Synthetic construct
  source 1..21: mol_type = other DNA
aacaacgacgatcggtagcca

SEQ ID NO: 5322 - DNA, 21 bp, synthetic construct
  misc_feature 1..21: note = Synthetic construct
  source 1..21: mol_type = other DNA
acaacgacgatcggtagccag

SEQ ID NO: 5323 - DNA, 21 bp, synthetic construct
  misc_feature 1..21: note = Synthetic construct
  source 1..21: mol_type = other DNA
caacgacgatcggtagccaga

SEQ ID NO: 5324 - DNA, 21 bp, synthetic construct
  misc_feature 1..21: note = Synthetic construct
  source 1..21: mol_type = other DNA
aacgacgatcggtagccagag

SEQ ID NO: 5325 - DNA, 21 bp, synthetic construct
  misc_feature 1..21: note = Synthetic construct
  source 1..21: mol_type = other DNA
acgacgatcggtagccagaga

SEQ ID NO: 5326 - DNA, 21 bp, synthetic construct
  misc_feature 1..21: note = Synthetic construct
  source 1..21: mol_type = other DNA
cgacgatcggtagccagagag

SEQ ID NO: 5327 - DNA, 21 bp, synthetic construct
  misc_feature 1..21: note = Synthetic construct
  source 1..21: mol_type = other DNA
gacgatcggtagccagagagg

SEQ ID NO: 5328 - DNA, 21 bp, synthetic construct
  misc_feature 1..21: note = Synthetic construct
  source 1..21: mol_type = other DNA
acgatcggtagccagagagga

SEQ ID NO: 5329 - DNA, 21 bp, synthetic construct
  misc_feature 1..21: note = Synthetic construct
  source 1..21: mol_type = other DNA
cgatcggtagccagagaggag

SEQ ID NO: 5330 - DNA, 21 bp, synthetic construct
  misc_feature 1..21: note = Synthetic construct
  source 1..21: mol_type = other DNA
gatcggtagccagagaggagg

SEQ ID NO: 5331 - DNA, 21 bp, synthetic construct
  misc_feature 1..21: note = Synthetic construct
  source 1..21: mol_type = other DNA
atcggtagccagagaggaggt

SEQ ID NO: 5332 - DNA, 21 bp, synthetic construct
  misc_feature 1..21: note = Synthetic construct
  source 1..21: mol_type = other DNA
tcggtagccagagaggaggtt

SEQ ID NO: 5333 - DNA, 21 bp, synthetic construct
  misc_feature 1..21: note = Synthetic construct
  source 1..21: mol_type = other DNA
cggtagccagagaggaggttg

SEQ ID NO: 5334 - DNA, 21 bp, synthetic construct
  misc_feature 1..21: note = Synthetic construct
  source 1..21: mol_type = other DNA
ggtagccagagaggaggttgc

SEQ ID NO: 5335 - DNA, 21 bp, synthetic construct
  misc_feature 1..21: note = Synthetic construct
  source 1..21: mol_type = other DNA
gtagccagagaggaggttgcc

SEQ ID NO: 5336 - DNA, 21 bp, synthetic construct
  misc_feature 1..21: note = Synthetic construct
  source 1..21: mol_type = other DNA
tagccagagaggaggttgcca

SEQ ID NO: 5337 - DNA, 21 bp, synthetic construct
  misc_feature 1..21: note = Synthetic construct
  source 1..21: mol_type = other DNA
agccagagaggaggttgccaa

SEQ ID NO: 5338 - DNA, 21 bp, synthetic construct
  misc_feature 1..21: note = Synthetic construct
  source 1..21: mol_type = other DNA
gccagagaggaggttgccaat

SEQ ID NO: 5339 - DNA, 21 bp, synthetic construct
  misc_feature 1..21: note = Synthetic construct
  source 1..21: mol_type = other DNA
ccagagaggaggttgccaata

SEQ ID NO: 5340 - DNA, 21 bp, synthetic construct
  misc_feature 1..21: note = Synthetic construct
  source 1..21: mol_type = other DNA
cagagaggaggttgccaataa

SEQ ID NO: 5341 - DNA, 21 bp, synthetic construct
  misc_feature 1..21: note = Synthetic construct
  source 1..21: mol_type = other DNA
agagaggaggttgccaataag

SEQ ID NO: 5342 - DNA, 21 bp, synthetic construct
  misc_feature 1..21: note = Synthetic construct
  source 1..21: mol_type = other DNA
gagaggaggttgccaataagg

SEQ ID NO: 5343 - DNA, 21 bp, synthetic construct
  misc_feature 1..21: note = Synthetic construct
  source 1..21: mol_type = other DNA
agaggaggttgccaataaggc

SEQ ID NO: 5344 - DNA, 21 bp, synthetic construct
  misc_feature 1..21: note = Synthetic construct
  source 1..21: mol_type = other DNA
gaggaggttgccaataaggct

SEQ ID NO: 5345 - DNA, 21 bp, synthetic construct
  misc_feature 1..21: note = Synthetic construct
  source 1..21: mol_type = other DNA
aggaggttgccaataaggcta

SEQ ID NO: 5346 - DNA, 21 bp, synthetic construct
  misc_feature 1..21: note = Synthetic construct
  source 1..21: mol_type = other DNA
ggaggttgccaataaggctac

SEQ ID NO: 5347 - DNA, 21 bp, synthetic construct
  misc_feature 1..21: note = Synthetic construct
  source 1..21: mol_type = other DNA
gaggttgccaataaggctacg

SEQ ID NO: 5348 - DNA, 21 bp, synthetic construct
  misc_feature 1..21: note = Synthetic construct
  source 1..21: mol_type = other DNA
aggttgccaataaggctacgg

SEQ ID NO: 5349 - DNA, 21 bp, synthetic construct
  misc_feature 1..21: note = Synthetic construct
  source 1..21: mol_type = other DNA
ggttgccaataaggctacgga

SEQ ID NO: 5350 - DNA, 21 bp, synthetic construct
  misc_feature 1..21: note = Synthetic construct
  source 1..21: mol_type = other DNA
gttgccaataaggctacggat

SEQ ID NO: 5351 - DNA, 21 bp, synthetic construct
  misc_feature 1..21: note = Synthetic construct
  source 1..21: mol_type = other DNA
ttgccaataaggctacggatg

SEQ ID NO: 5352 - DNA, 21 bp, synthetic construct
  misc_feature 1..21: note = Synthetic construct
  source 1..21: mol_type = other DNA
tgccaataaggctacggatgc

SEQ ID NO: 5353 - DNA, 21 bp, synthetic construct
  misc_feature 1..21: note = Synthetic construct
  source 1..21: mol_type = other DNA
gccaataaggctacggatgct

SEQ ID NO: 5354 - DNA, 21 bp, synthetic construct
  misc_feature 1..21: note = Synthetic construct
  source 1..21: mol_type = other DNA
ccaataaggctacggatgctg

SEQ ID NO: 5355 - DNA, 21 bp, synthetic construct
  misc_feature 1..21: note = Synthetic construct
  source 1..21: mol_type = other DNA
caataaggctacggatgctgg

SEQ ID NO: 5356 - DNA, 21 bp, synthetic construct
  misc_feature 1..21: note = Synthetic construct
  source 1..21: mol_type = other DNA
aataaggctacggatgctggt

SEQ ID NO: 5357 - DNA, 21 bp, synthetic construct
  misc_feature 1..21: note = Synthetic construct
  source 1..21: mol_type = other DNA
ataaggctacggatgctggtt

SEQ ID NO: 5358 - DNA, 21 bp, synthetic construct
  misc_feature 1..21: note = Synthetic construct
  source 1..21: mol_type = other DNA
taaggctacggatgctggttt

SEQ ID NO: 5359 - DNA, 21 bp, synthetic construct
  misc_feature 1..21: note = Synthetic construct
  source 1..21: mol_type = other DNA
aaggctacggatgctggtttg

SEQ ID NO: 5360 - DNA, 21 bp, synthetic construct
  misc_feature 1..21: note = Synthetic construct
  source 1..21: mol_type = other DNA
aggctacggatgctggtttgt

SEQ ID NO: 5361 - DNA, 21 bp, synthetic construct
  misc_feature 1..21: note = Synthetic construct
  source 1..21: mol_type = other DNA
ggctacggatgctggtttgta

SEQ ID NO: 5362 - DNA, 21 bp, synthetic construct
  misc_feature 1..21: note = Synthetic construct
  source 1..21: mol_type = other DNA
gctacggatgctggtttgtaa

SEQ ID NO: 5363 - DNA, 21 bp, synthetic construct
  misc_feature 1..21: note = Synthetic construct
  source 1..21: mol_type = other DNA
ctacggatgctggtttgtaaa

SEQ ID NO: 5364 - DNA, 21 bp, synthetic construct
  misc_feature 1..21: note = Synthetic construct
  source 1..21: mol_type = other DNA
tacggatgctggtttgtaaaa

SEQ ID NO: 5365 - DNA, 21 bp, synthetic construct
  misc_feature 1..21: note = Synthetic construct
  source 1..21: mol_type = other DNA
acggatgctggtttgtaaaac

SEQ ID NO: 5366 - DNA, 21 bp, synthetic construct
  misc_feature 1..21: note = Synthetic construct
  source 1..21: mol_type = other DNA
cggatgctggtttgtaaaaca

SEQ ID NO: 5367 - DNA, 21 bp, synthetic construct
  misc_feature 1..21: note = Synthetic construct
  source 1..21: mol_type = other DNA
ggatgctggtttgtaaaacat

SEQ ID NO: 5368 - DNA, 21 bp, synthetic construct
  misc_feature 1..21: note = Synthetic construct
  source 1..21: mol_type = other DNA
gatgctggtttgtaaaacatc

SEQ ID NO: 5369 - DNA, 21 bp, synthetic construct
  misc_feature 1..21: note = Synthetic construct
  source 1..21: mol_type = other DNA
atgctggtttgtaaaacatcc

SEQ ID NO: 5370 - DNA, 21 bp, synthetic construct
  misc_feature 1..21: note = Synthetic construct
  source 1..21: mol_type = other DNA
tgctggtttgtaaaacatccg

SEQ ID NO: 5371 - DNA, 21 bp, synthetic construct
  misc_feature 1..21: note = Synthetic construct
  source 1..21: mol_type = other DNA
gctggtttgtaaaacatccgg

SEQ ID NO: 5372 - DNA, 21 bp, synthetic construct
  misc_feature 1..21: note = Synthetic construct
  source 1..21: mol_type = other DNA
ctggtttgtaaaacatccgga

SEQ ID NO: 5373 - DNA, 21 bp, synthetic construct
  misc_feature 1..21: note = Synthetic construct
  source 1..21: mol_type = other DNA
tggtttgtaaaacatccggat

SEQ ID NO: 5374 - DNA, 21 bp, synthetic construct
  misc_feature 1..21: note = Synthetic construct
  source 1..21: mol_type = other DNA
ggtttgtaaaacatccggatc

SEQ ID NO: 5375 - DNA, 21 bp, synthetic construct
  misc_feature 1..21: note = Synthetic construct
  source 1..21: mol_type = other DNA
gtttgtaaaacatccggatcc

SEQ ID NO: 5376 - DNA, 21 bp, synthetic construct
  misc_feature 1..21: note = Synthetic construct
  source 1..21: mol_type = other DNA
tttgtaaaacatccggatccc

SEQ ID NO: 5377 - DNA, 21 bp, synthetic construct
  misc_feature 1..21: note = Synthetic construct
  source 1..21: mol_type = other DNA
ttgtaaaacatccggatccca

SEQ ID NO: 5378 - DNA, 21 bp, synthetic construct
  misc_feature 1..21: note = Synthetic construct
  source 1..21: mol_type = other DNA
tgtaaaacatccggatcccat

SEQ ID NO: 5379 - DNA, 21 bp, synthetic construct
  misc_feature 1..21: note = Synthetic construct
  source 1..21: mol_type = other DNA
gtaaaacatccggatcccatg

SEQ ID NO: 5380 - DNA, 21 bp, synthetic construct
  misc_feature 1..21: note = Synthetic construct
  source 1..21: mol_type = other DNA
taaaacatccggatcccatga

SEQ ID NO: 5381 - DNA, 21 bp, synthetic construct
  misc_feature 1..21: note = Synthetic construct
  source 1..21: mol_type = other DNA
aaaacatccggatcccatgac

SEQ ID NO: 5382 - DNA, 21 bp, synthetic construct
  misc_feature 1..21: note = Synthetic construct
  source 1..21: mol_type = other DNA
aaacatccggatcccatgaca

SEQ ID NO: 5383 - DNA, 21 bp, synthetic construct
  misc_feature 1..21: note = Synthetic construct
  source 1..21: mol_type = other DNA
aacatccggatcccatgacaa

SEQ ID NO: 5384 - DNA, 21 bp, synthetic construct
  misc_feature 1..21: note = Synthetic construct
  source 1..21: mol_type = other DNA
acatccggatcccatgacaag

SEQ ID NO: 5385 - DNA, 21 bp, synthetic construct
  misc_feature 1..21: note = Synthetic construct
  source 1..21: mol_type = other DNA
catccggatcccatgacaagg

SEQ ID NO: 5386 - DNA, 21 bp, synthetic construct
  misc_feature 1..21: note = Synthetic construct
  source 1..21: mol_type = other DNA
atccggatcccatgacaagga

SEQ ID NO: 5387 - DNA, 21 bp, synthetic construct
  misc_feature 1..21: note = Synthetic construct
  source 1..21: mol_type = other DNA
tccggatcccatgacaaggat

SEQ ID NO: 5388 - DNA, 21 bp, synthetic construct
  misc_feature 1..21: note = Synthetic construct
  source 1..21: mol_type = other DNA
ccggatcccatgacaaggatt

SEQ ID NO: 5389 - DNA, 21 bp, synthetic construct
  misc_feature 1..21: note = Synthetic construct
  source 1..21: mol_type = other DNA
cggatcccatgacaaggattt

SEQ ID NO: 5390 - DNA, 21 bp, synthetic construct
  misc_feature 1..21: note = Synthetic construct
  source 1..21: mol_type = other DNA
ggatcccatgacaaggatttg

SEQ ID NO: 5391 - DNA, 21 bp, synthetic construct
  misc_feature 1..21: note = Synthetic construct
  source 1..21: mol_type = other DNA
gatcccatgacaaggatttgt

SEQ ID NO: 5392 - DNA, 21 bp, synthetic construct
  misc_feature 1..21: note = Synthetic construct
  source 1..21: mol_type = other DNA
atcccatgacaaggatttgtc

SEQ ID NO: 5393 - DNA, 21 bp, synthetic construct
  misc_feature 1..21: note = Synthetic construct
  source 1..21: mol_type = other DNA
tcccatgacaaggatttgtca

SEQ ID NO: 5394 - DNA, 21 bp, synthetic construct
  misc_feature 1..21: note = Synthetic construct
  source 1..21: mol_type = other DNA
cccatgacaaggatttgtcat

SEQ ID NO: 5395 - DNA, 21 bp, synthetic construct
  misc_feature 1..21: note = Synthetic construct
  source 1..21: mol_type = other DNA
ccatgacaaggatttgtcatg

SEQ ID NO: 5396 - DNA, 21 bp, synthetic construct
  misc_feature 1..21: note = Synthetic construct
  source 1..21: mol_type = other DNA
catgacaaggatttgtcatgt

SEQ ID NO: 5397 - DNA, 21 bp, synthetic construct
  misc_feature 1..21: note = Synthetic construct
  source 1..21: mol_type = other DNA
atgacaaggatttgtcatgta

SEQ ID NO: 5398 - DNA, 21 bp, synthetic construct
  misc_feature 1..21: note = Synthetic construct
  source 1..21: mol_type = other DNA
tgacaaggatttgtcatgtaa

SEQ ID NO: 5399 - DNA, 21 bp, synthetic construct
  misc_feature 1..21: note = Synthetic construct
  source 1..21: mol_type = other DNA
gacaaggatttgtcatgtaag

SEQ ID NO: 5400 - DNA, 21 bp, synthetic construct
  misc_feature 1..21: note = Synthetic construct
  source 1..21: mol_type = other DNA
acaaggatttgtcatgtaaga

SEQ ID NO: 5401 - DNA, 21 bp, synthetic construct
  misc_feature 1..21: note = Synthetic construct
  source 1..21: mol_type = other DNA
caaggatttgtcatgtaagaa

SEQ ID NO: 5402 - DNA, 21 bp, synthetic construct
  misc_feature 1..21: note = Synthetic construct
  source 1..21: mol_type = other DNA
aaggatttgtcatgtaagaaa

SEQ ID NO: 5403 - DNA, 21 bp, synthetic construct
  misc_feature 1..21: note = Synthetic construct
  source 1..21: mol_type = other DNA
aggatttgtcatgtaagaaac

SEQ ID NO: 5404 - DNA, 21 bp, synthetic construct
  misc_feature 1..21: note = Synthetic construct
  source 1..21: mol_type = other DNA
ggatttgtcatgtaagaaacc

SEQ ID NO: 5405 - DNA, 21 bp, synthetic construct
  misc_feature 1..21: note = Synthetic construct
  source 1..21: mol_type = other DNA
gatttgtcatgtaagaaacct

SEQ ID NO: 5406 - DNA, 21 bp, synthetic construct
  misc_feature 1..21: note = Synthetic construct
  source 1..21: mol_type = other DNA
atttgtcatgtaagaaacctt

SEQ ID NO: 5407 - DNA, 21 bp, synthetic construct
  misc_feature 1..21: note = Synthetic construct
  source 1..21: mol_type = other DNA
tttgtcatgtaagaaaccttc

SEQ ID NO: 5408 - DNA, 21 bp, synthetic construct
  misc_feature 1..21: note = Synthetic construct
  source 1..21: mol_type = other DNA
ttgtcatgtaagaaaccttct

SEQ ID NO: 5409 - DNA, 21 bp, synthetic construct
  misc_feature 1..21: note = Synthetic construct
  source 1..21: mol_type = other DNA
tgtcatgtaagaaaccttctc

SEQ ID NO: 5410 - DNA, 21 bp, synthetic construct
  misc_feature 1..21: note = Synthetic construct
  source 1..21: mol_type = other DNA
gtcatgtaagaaaccttctct

SEQ ID NO: 5411 - DNA, 21 bp, synthetic construct
  misc_feature 1..21: note = Synthetic construct
  source 1..21: mol_type = other DNA
tcatgtaagaaaccttctcta

SEQ ID NO: 5412 - DNA, 21 bp, synthetic construct
  misc_feature 1..21: note = Synthetic construct
  source 1..21: mol_type = other DNA
catgtaagaaaccttctctat

SEQ ID NO: 5413 - DNA, 21 bp, synthetic construct
  misc_feature 1..21: note = Synthetic construct
  source 1..21: mol_type = other DNA
atgtaagaaaccttctctatt

SEQ ID NO: 5414 - DNA, 21 bp, synthetic construct
  misc_feature 1..21: note = Synthetic construct
  source 1..21: mol_type = other DNA
tgtaagaaaccttctctattt

SEQ ID NO: 5415 - DNA, 21 bp, synthetic construct
  misc_feature 1..21: note = Synthetic construct
  source 1..21: mol_type = other DNA
gtaagaaaccttctctattta

SEQ ID NO: 5416 - DNA, 21 bp, synthetic construct
  misc_feature 1..21: note = Synthetic construct
  source 1..21: mol_type = other DNA
taagaaaccttctctatttat

SEQ ID NO: 5417 - DNA, 21 bp, synthetic construct
  misc_feature 1..21: note = Synthetic construct
  source 1..21: mol_type = other DNA
aagaaaccttctctatttatc

SEQ ID NO: 5418 - DNA, 21 bp, synthetic construct
  misc_feature 1..21: note = Synthetic construct
  source 1..21: mol_type = other DNA
agaaaccttctctatttatct

SEQ ID NO: 5419 - DNA, 21 bp, synthetic construct
  misc_feature 1..21: note = Synthetic construct
  source 1..21: mol_type = other DNA
gaaaccttctctatttatctg

SEQ ID NO: 5420 - DNA, 21 bp, synthetic construct
  misc_feature 1..21: note = Synthetic construct
  source 1..21: mol_type = other DNA
aaaccttctctatttatctga

SEQ ID NO: 5421 - DNA, 21 bp, synthetic construct
  misc_feature 1..21: note = Synthetic construct
  source 1..21: mol_type = other DNA
aaccttctctatttatctgac

SEQ ID NO: 5422 - DNA, 21 bp, synthetic construct
  misc_feature 1..21: note = Synthetic construct
  source 1..21: mol_type = other DNA
accttctctatttatctgacc

SEQ ID NO: 5423 - DNA, 21 bp, synthetic construct
  misc_feature 1..21: note = Synthetic construct
  source 1..21: mol_type = other DNA
ccttctctatttatctgaccg

SEQ ID NO: 5424 - DNA, 21 bp, synthetic construct
  misc_feature 1..21: note = Synthetic construct
  source 1..21: mol_type = other DNA
cttctctatttatctgaccgc

SEQ ID NO: 5425 - DNA, 21 bp, synthetic construct
  misc_feature 1..21: note = Synthetic construct
  source 1..21: mol_type = other DNA
ttctctatttatctgaccgcg

SEQ ID NO: 5426 - DNA, 21 bp, synthetic construct
  misc_feature 1..21: note = Synthetic construct
  source 1..21: mol_type = other DNA
tctctatttatctgaccgcga

SEQ ID NO: 5427 - DNA, 21 bp, synthetic construct
  misc_feature 1..21: note = Synthetic construct
  source 1..21: mol_type = other DNA
ctctatttatctgaccgcgat

SEQ ID NO: 5428 - DNA, 21 bp, synthetic construct
  misc_feature 1..21: note = Synthetic construct
  source 1..21: mol_type = other DNA
tctatttatctgaccgcgatc

SEQ ID NO: 5429 - DNA, 21 bp, synthetic construct
  misc_feature 1..21: note = Synthetic construct
  source 1..21: mol_type = other DNA
ctatttatctgaccgcgatca

SEQ ID NO: 5430 - DNA, 21 bp, synthetic construct
  misc_feature 1..21: note = Synthetic construct
  source 1..21: mol_type = other DNA
tatttatctgaccgcgatcac

SEQ ID NO: 5431 - DNA, 21 bp, synthetic construct
  misc_feature 1..21: note = Synthetic construct
  source 1..21: mol_type = other DNA
atttatctgaccgcgatcacc

SEQ ID NO: 5432 - DNA, 21 bp, synthetic construct
  misc_feature 1..21: note = Synthetic construct
  source 1..21: mol_type = other DNA
tttatctgaccgcgatcacca

SEQ ID NO: 5433 - DNA, 21 bp, synthetic construct
  misc_feature 1..21: note = Synthetic construct
  source 1..21: mol_type = other DNA
ttatctgaccgcgatcaccat

SEQ ID NO: 5434 - DNA, 21 bp, synthetic construct
  misc_feature 1..21: note = Synthetic construct
  source 1..21: mol_type = other DNA
tatctgaccgcgatcaccatt

SEQ ID NO: 5435 - DNA, 21 bp, synthetic construct
  misc_feature 1..21: note = Synthetic construct
  source 1..21: mol_type = other DNA
atctgaccgcgatcaccattc

SEQ ID NO: 5436 - DNA, 21 bp, synthetic construct
  misc_feature 1..21: note = Synthetic construct
  source 1..21: mol_type = other DNA
tctgaccgcgatcaccattcg

SEQ ID NO: 5437 - DNA, 21 bp, synthetic construct
  misc_feature 1..21: note = Synthetic construct
  source 1..21: mol_type = other DNA
ctgaccgcgatcaccattcgc

SEQ ID NO: 5438 - DNA, 21 bp, synthetic construct
  misc_feature 1..21: note = Synthetic construct
  source 1..21: mol_type = other DNA
tgaccgcgatcaccattcgcc

SEQ ID NO: 5439 - DNA, 21 bp, synthetic construct
  misc_feature 1..21: note = Synthetic construct
  source 1..21: mol_type = other DNA
gaccgcgatcaccattcgcct

SEQ ID NO: 5440 - DNA, 21 bp, synthetic construct
  misc_feature 1..21: note = Synthetic construct
  source 1..21: mol_type = other DNA
accgcgatcaccattcgcctc

SEQ ID NO: 5441 - DNA, 21 bp, synthetic construct
  misc_feature 1..21: note = Synthetic construct
  source 1..21: mol_type = other DNA
ccgcgatcaccattcgcctcc

SEQ ID NO: 5442 - DNA, 21 bp, synthetic construct
  misc_feature 1..21: note = Synthetic construct
  source 1..21: mol_type = other DNA
cgcgatcaccattcgcctccc

SEQ ID NO: 5443 - DNA, 21 bp, synthetic construct
  misc_feature 1..21: note = Synthetic construct
  source 1..21: mol_type = other DNA
gcgatcaccattcgcctcccg

SEQ ID NO: 5444 - DNA, 21 bp, synthetic construct
  misc_feature 1..21: note = Synthetic construct
  source 1..21: mol_type = other DNA
cgatcaccattcgcctcccgt

SEQ ID NO: 5445 - DNA, 21 bp, synthetic construct
  misc_feature 1..21: note = Synthetic construct
  source 1..21: mol_type = other DNA
gatcaccattcgcctcccgta

SEQ ID NO: 5446 - DNA, 21 bp, synthetic construct
  misc_feature 1..21: note = Synthetic construct
  source 1..21: mol_type = other DNA
atcaccattcgcctcccgtag

SEQ ID NO: 5447 - DNA, 21 bp, synthetic construct
  misc_feature 1..21: note = Synthetic construct
  source 1..21: mol_type = other DNA
tcaccattcgcctcccgtagc

SEQ ID NO: 5448 - DNA, 21 bp, synthetic construct
  misc_feature 1..21: note = Synthetic construct
  source 1..21: mol_type = other DNA
caccattcgcctcccgtagct

SEQ ID NO: 5449 - DNA, 21 bp, synthetic construct
  misc_feature 1..21: note = Synthetic construct
  source 1..21: mol_type = other DNA
accattcgcctcccgtagctt

SEQ ID NO: 5450 - DNA, 21 bp, synthetic construct
  misc_feature 1..21: note = Synthetic construct
  source 1..21: mol_type = other DNA
ccattcgcctcccgtagctta

SEQ ID NO: 5451 - DNA, 21 bp, synthetic construct
  misc_feature 1..21: note = Synthetic construct
  source 1..21: mol_type = other DNA
cattcgcctcccgtagcttag

SEQ ID NO: 5452 - DNA, 21 bp, synthetic construct
  misc_feature 1..21: note = Synthetic construct
  source 1..21: mol_type = other DNA
attcgcctcccgtagcttagc

SEQ ID NO: 5453 - DNA, 21 bp, synthetic construct
  misc_feature 1..21: note = Synthetic construct
  source 1..21: mol_type = other DNA
ttcgcctcccgtagcttagcg

SEQ ID NO: 5454 - DNA, 21 bp, synthetic construct
  misc_feature 1..21: note = Synthetic construct
  source 1..21: mol_type = other DNA
tcgcctcccgtagcttagcga

SEQ ID NO: 5455 - DNA, 21 bp, synthetic construct
  misc_feature 1..21: note = Synthetic construct
  source 1..21: mol_type = other DNA
cgcctcccgtagcttagcgat

SEQ ID NO: 5456 - DNA, 21 bp, synthetic construct
  misc_feature 1..21: note = Synthetic construct
  source 1..21: mol_type = other DNA
gcctcccgtagcttagcgata

SEQ ID NO: 5457 - DNA, 21 bp, synthetic construct
  misc_feature 1..21: note = Synthetic construct
  source 1..21: mol_type = other DNA
cctcccgtagcttagcgatag

SEQ ID NO: 5458 - DNA, 21 bp, synthetic construct
  misc_feature 1..21: note = Synthetic construct
  source 1..21: mol_type = other DNA
ctcccgtagcttagcgatagc

SEQ ID NO: 5459 - DNA, 21 bp, synthetic construct
  misc_feature 1..21: note = Synthetic construct
  source 1..21: mol_type = other DNA
tcccgtagcttagcgatagct

SEQ ID NO: 5460 - DNA, 21 bp, synthetic construct
  misc_feature 1..21: note = Synthetic construct
  source 1..21: mol_type = other DNA
cccgtagcttagcgatagcta

SEQ ID NO: 5461 - DNA, 21 bp, synthetic construct
  misc_feature 1..21: note = Synthetic construct
  source 1..21: mol_type = other DNA
ccgtagcttagcgatagctaa

SEQ ID NO: 5462 - DNA, 21 bp, synthetic construct
  misc_feature 1..21: note = Synthetic construct
  source 1..21: mol_type = other DNA
cgtagcttagcgatagctaag

SEQ ID NO: 5463 - DNA, 21 bp, synthetic construct
  misc_feature 1..21: note = Synthetic construct
  source 1..21: mol_type = other DNA
gtagcttagcgatagctaagg

SEQ ID NO: 5464 - DNA, 21 bp, synthetic construct
  misc_feature 1..21: note = Synthetic construct
  source 1..21: mol_type = other DNA
tagcttagcgatagctaaggt

SEQ ID NO: 5465 - DNA, 21 bp, synthetic construct
  misc_feature 1..21: note = Synthetic construct
  source 1..21: mol_type = other DNA
agcttagcgatagctaaggta

SEQ ID NO: 5466 - DNA, 21 bp, synthetic construct
  misc_feature 1..21: note = Synthetic construct
  source 1..21: mol_type = other DNA
gcttagcgatagctaaggtac

SEQ ID NO: 5467 - DNA, 21 bp, synthetic construct
  misc_feature 1..21: note = Synthetic construct
  source 1..21: mol_type = other DNA
cttagcgatagctaaggtacg

SEQ ID NO: 5468 - DNA, 21 bp, synthetic construct
  misc_feature 1..21: note = Synthetic construct
  source 1..21: mol_type = other DNA
ttagcgatagctaaggtacga

SEQ ID NO: 5469 - DNA, 21 bp, synthetic construct
  misc_feature 1..21: note = Synthetic construct
  source 1..21: mol_type = other DNA
tagcgatagctaaggtacgac

SEQ ID NO: 5470 - DNA, 21 bp, synthetic construct
  misc_feature 1..21: note = Synthetic construct
  source 1..21: mol_type = other DNA
agcgatagctaaggtacgacg

SEQ ID NO: 5471 - DNA, 21 bp, synthetic construct
  misc_feature 1..21: note = Synthetic construct
  source 1..21: mol_type = other DNA
gcgatagctaaggtacgacgg

SEQ ID NO: 5472 - DNA, 21 bp, synthetic construct
  misc_feature 1..21: note = Synthetic construct
  source 1..21: mol_type = other DNA
cgatagctaaggtacgacggg

SEQ ID NO: 5473 - DNA, 21 bp, synthetic construct
  misc_feature 1..21: note = Synthetic construct
  source 1..21: mol_type = other DNA
gatagctaaggtacgacgggt

SEQ ID NO: 5474 - DNA, 21 bp, synthetic construct
  misc_feature 1..21: note = Synthetic construct
  source 1..21: mol_type = other DNA
atagctaaggtacgacgggtc

SEQ ID NO: 5475 - DNA, 21 bp, synthetic construct
  misc_feature 1..21: note = Synthetic construct
  source 1..21: mol_type = other DNA
tagctaaggtacgacgggtcg

SEQ ID NO: 5476 - DNA, 21 bp, synthetic construct
  misc_feature 1..21: note = Synthetic construct
  source 1..21: mol_type = other DNA
agctaaggtacgacgggtcgc

SEQ ID NO: 5477 - DNA, 21 bp, synthetic construct
  misc_feature 1..21: note = Synthetic construct
  source 1..21: mol_type = other DNA
gctaaggtacgacgggtcgcc

SEQ ID NO: 5478 - DNA, 21 bp, synthetic construct
  misc_feature 1..21: note = Synthetic construct
  source 1..21: mol_type = other DNA
ctaaggtacgacgggtcgcct

SEQ ID NO: 5479 - DNA, 21 bp, synthetic construct
  misc_feature 1..21: note = Synthetic construct
  source 1..21: mol_type = other DNA
taaggtacgacgggtcgcctc

SEQ ID NO: 5480 - DNA, 21 bp, synthetic construct
  misc_feature 1..21: note = Synthetic construct
  source 1..21: mol_type = other DNA
aaggtacgacgggtcgcctcg

SEQ ID NO: 5481 - DNA, 21 bp, synthetic construct
  misc_feature 1..21: note = Synthetic construct
  source 1..21: mol_type = other DNA
aggtacgacgggtcgcctcgt

SEQ ID NO: 5482 - DNA, 21 bp, synthetic construct
  misc_feature 1..21: note = Synthetic construct
  source 1..21: mol_type = other DNA
ggtacgacgggtcgcctcgtc

SEQ ID NO: 5483 - DNA, 21 bp, synthetic construct
  misc_feature 1..21: note = Synthetic construct
  source 1..21: mol_type = other DNA
gtacgacgggtcgcctcgtca

SEQ ID NO: 5484 - DNA, 21 bp, synthetic construct
  misc_feature 1..21: note = Synthetic construct
  source 1..21: mol_type = other DNA
tacgacgggtcgcctcgtcat

SEQ ID NO: 5485 - DNA, 21 bp, synthetic construct
  misc_feature 1..21: note = Synthetic construct
  source 1..21: mol_type = other DNA
acgacgggtcgcctcgtcatt

SEQ ID NO: 5486 - DNA, 21 bp, synthetic construct
  misc_feature 1..21: note = Synthetic construct
  source 1..21: mol_type = other DNA
cgacgggtcgcctcgtcatta

SEQ ID NO: 5487 - DNA, 21 bp, synthetic construct
  misc_feature 1..21: note = Synthetic construct
  source 1..21: mol_type = other DNA
gacgggtcgcctcgtcattac

SEQ ID NO: 5488 - DNA, 21 bp, synthetic construct
  misc_feature 1..21: note = Synthetic construct
  source 1..21: mol_type = other DNA
acgggtcgcctcgtcattacc

SEQ ID NO: 5489 - DNA, 21 bp, synthetic construct
  misc_feature 1..21: note = Synthetic construct
  source 1..21: mol_type = other DNA
cgggtcgcctcgtcattacca

SEQ ID NO: 5490 - DNA, 21 bp, synthetic construct
  misc_feature 1..21: note = Synthetic construct
  source 1..21: mol_type = other DNA
gggtcgcctcgtcattaccag

SEQ ID NO: 5491 - DNA, 21 bp, synthetic construct
  misc_feature 1..21: note = Synthetic construct
  source 1..21: mol_type = other DNA
ggtcgcctcgtcattaccaga

SEQ ID NO: 5492 - DNA, 21 bp, synthetic construct
  misc_feature 1..21: note = Synthetic construct
  source 1..21: mol_type = other DNA
gtcgcctcgtcattaccagaa

SEQ ID NO: 5493 - DNA, 21 bp, synthetic construct
  misc_feature 1..21: note = Synthetic construct
  source 1..21: mol_type = other DNA
tcgcctcgtcattaccagaac

SEQ ID NO: 5494 - DNA, 21 bp, synthetic construct
  misc_feature 1..21: note = Synthetic construct
  source 1..21: mol_type = other DNA
cgcctcgtcattaccagaacc

SEQ ID NO: 5495 - DNA, 21 bp, synthetic construct
  misc_feature 1..21: note = Synthetic construct
  source 1..21: mol_type = other DNA
gcctcgtcattaccagaacct

SEQ ID NO: 5496 - DNA, 21 bp, synthetic construct
  misc_feature 1..21: note = Synthetic construct
  source 1..21: mol_type = other DNA
cctcgtcattaccagaaccta

SEQ ID NO: 5497 - DNA, 21 bp, synthetic construct
  misc_feature 1..21: note = Synthetic construct
  source 1..21: mol_type = other DNA
ctcgtcattaccagaacctaa

SEQ ID NO: 5498 - DNA, 21 bp, synthetic construct
  misc_feature 1..21: note = Synthetic construct
  source 1..21: mol_type = other DNA
tcgtcattaccagaacctaag

SEQ ID NO: 5499 - DNA, 21 bp, synthetic construct
  misc_feature 1..21: note = Synthetic construct
  source 1..21: mol_type = other DNA
cgtcattaccagaacctaagg

SEQ ID NO: 5500 - DNA, 21 bp, synthetic construct
  misc_feature 1..21: note = Synthetic construct
  source 1..21: mol_type = other DNA
gtcattaccagaacctaaggt

SEQ ID NO: 5501 - DNA, 21 bp, synthetic construct
  misc_feature 1..21: note = Synthetic construct
  source 1..21: mol_type = other DNA
tcattaccagaacctaaggtc

SEQ ID NO: 5502 - DNA, 21 bp, synthetic construct
  misc_feature 1..21: note = Synthetic construct
  source 1..21: mol_type = other DNA
cattaccagaacctaaggtcg

SEQ ID NO: 5503 - DNA, 21 bp, synthetic construct
  misc_feature 1..21: note = Synthetic construct
  source 1..21: mol_type = other DNA
attaccagaacctaaggtcgg

SEQ ID NO: 5504 - DNA, 21 bp, synthetic construct
  misc_feature 1..21: note = Synthetic construct
  source 1..21: mol_type = other DNA
ttaccagaacctaaggtcgga

SEQ ID NO: 5505 - DNA, 21 bp, synthetic construct
  misc_feature 1..21: note = Synthetic construct
  source 1..21: mol_type = other DNA
taccagaacctaaggtcggat

SEQ ID NO: 5506 - DNA, 21 bp, synthetic construct
  misc_feature 1..21: note = Synthetic construct
  source 1..21: mol_type = other DNA
accagaacctaaggtcggatg

SEQ ID NO: 5507 - DNA, 21 bp, synthetic construct
  misc_feature 1..21: note = Synthetic construct
  source 1..21: mol_type = other DNA
ccagaacctaaggtcggatgc

SEQ ID NO: 5508 - DNA, 21 bp, synthetic construct
  misc_feature 1..21: note = Synthetic construct
  source 1..21: mol_type = other DNA
cagaacctaaggtcggatgct

SEQ ID NO: 5509 - DNA, 21 bp, synthetic construct
  misc_feature 1..21: note = Synthetic construct
  source 1..21: mol_type = other DNA
agaacctaaggtcggatgctt

SEQ ID NO: 5510 - DNA, 21 bp, synthetic construct
  misc_feature 1..21: note = Synthetic construct
  source 1..21: mol_type = other DNA
gaacctaaggtcggatgcttt

SEQ ID NO: 5511 - DNA, 21 bp, synthetic construct
  misc_feature 1..21: note = Synthetic construct
  source 1..21: mol_type = other DNA
aacctaaggtcggatgctttg

SEQ ID NO: 5512 - DNA, 21 bp, synthetic construct
  misc_feature 1..21: note = Synthetic construct
  source 1..21: mol_type = other DNA
acctaaggtcggatgctttgt

SEQ ID NO: 5513 - DNA, 21 bp, synthetic construct
  misc_feature 1..21: note = Synthetic construct
  source 1..21: mol_type = other DNA
cctaaggtcggatgctttgtg

SEQ ID NO: 5514 - DNA, 21 bp, synthetic construct
  misc_feature 1..21: note = Synthetic construct
  source 1..21: mol_type = other DNA
ctaaggtcggatgctttgtga

SEQ ID NO: 5515 - DNA, 21 bp, synthetic construct
  misc_feature 1..21: note = Synthetic construct
  source 1..21: mol_type = other DNA
taaggtcggatgctttgtgag

SEQ ID NO: 5516 - DNA, 21 bp, synthetic construct
  misc_feature 1..21: note = Synthetic construct
  source 1..21: mol_type = other DNA
aaggtcggatgctttgtgagc

SEQ ID NO: 5517 - DNA, 21 bp, synthetic construct
  misc_feature 1..21: note = Synthetic construct
  source 1..21: mol_type = other DNA
aggtcggatgctttgtgagca

SEQ ID NO: 5518 - DNA, 21 bp, synthetic construct
  misc_feature 1..21: note = Synthetic construct
  source 1..21: mol_type = other DNA
ggtcggatgctttgtgagcaa

SEQ ID NO: 5519 - DNA, 21 bp, synthetic construct
  misc_feature 1..21: note = Synthetic construct
  source 1..21: mol_type = other DNA
gtcggatgctttgtgagcaat

SEQ ID NO: 5520 - DNA, 21 bp, synthetic construct
  misc_feature 1..21: note = Synthetic construct
  source 1..21: mol_type = other DNA
tcggatgctttgtgagcaatt

SEQ ID NO: 5521 - DNA, 21 bp, synthetic construct
  misc_feature 1..21: note = Synthetic construct
  source 1..21: mol_type = other DNA
cggatgctttgtgagcaattc

SEQ ID NO: 5522 - DNA, 21 bp, synthetic construct
  misc_feature 1..21: note = Synthetic construct
  source 1..21: mol_type = other DNA
ggatgctttgtgagcaattcg

SEQ ID NO: 5523 - DNA, 21 bp, synthetic construct
  misc_feature 1..21: note = Synthetic construct
  source 1..21: mol_type = other DNA
gatgctttgtgagcaattcgt

SEQ ID NO: 5524 - DNA, 21 bp, synthetic construct
  misc_feature 1..21: note = Synthetic construct
  source 1..21: mol_type = other DNA
atgctttgtgagcaattcgtc

SEQ ID NO: 5525 - DNA, 21 bp, synthetic construct
  misc_feature 1..21: note = Synthetic construct
  source 1..21: mol_type = other DNA
tgctttgtgagcaattcgtcc

SEQ ID NO: 5526 - DNA, 21 bp, synthetic construct
  misc_feature 1..21: note = Synthetic construct
  source 1..21: mol_type = other DNA
gctttgtgagcaattcgtccc

SEQ ID NO: 5527 - DNA, 21 bp, synthetic construct
  misc_feature 1..21: note = Synthetic construct
  source 1..21: mol_type = other DNA
ctttgtgagcaattcgtccct

SEQ ID NO: 5528 - DNA, 21 bp, synthetic construct
  misc_feature 1..21: note = Synthetic construct
  source 1..21: mol_type = other DNA
tttgtgagcaattcgtccctt

SEQ ID NO: 5529 - DNA, 21 bp, synthetic construct
  misc_feature 1..21: note = Synthetic construct
  source 1..21: mol_type = other DNA
ttgtgagcaattcgtccctta

SEQ ID NO: 5530 - DNA, 21 bp, synthetic construct
  misc_feature 1..21: note = Synthetic construct
  source 1..21: mol_type = other DNA
tgtgagcaattcgtcccttaa

SEQ ID NO: 5531 - DNA, 21 bp, synthetic construct
  misc_feature 1..21: note = Synthetic construct
  source 1..21: mol_type = other DNA
gtgagcaattcgtcccttaag

SEQ ID NO: 5532 - DNA, 21 bp, synthetic construct
  misc_feature 1..21: note = Synthetic construct
  source 1..21: mol_type = other DNA
tgagcaattcgtcccttaagt

SEQ ID NO: 5533 - DNA, 21 bp, synthetic construct
  misc_feature 1..21: note = Synthetic construct
  source 1..21: mol_type = other DNA
gagcaattcgtcccttaagta

SEQ ID NO: 5534 - DNA, 21 bp, synthetic construct
  misc_feature 1..21: note = Synthetic construct
  source 1..21: mol_type = other DNA
agcaattcgtcccttaagtaa

SEQ ID NO: 5535 - DNA, 21 bp, synthetic construct
  misc_feature 1..21: note = Synthetic construct
  source 1..21: mol_type = other DNA
gcaattcgtcccttaagtaag

SEQ ID NO: 5536 - DNA, 21 bp, synthetic construct
  misc_feature 1..21: note = Synthetic construct
  source 1..21: mol_type = other DNA
caattcgtcccttaagtaagc

SEQ ID NO: 5537 - DNA, 21 bp, synthetic construct
  misc_feature 1..21: note = Synthetic construct
  source 1..21: mol_type = other DNA
aattcgtcccttaagtaagca

SEQ ID NO: 5538 - DNA, 21 bp, synthetic construct
  misc_feature 1..21: note = Synthetic construct
  source 1..21: mol_type = other DNA
attcgtcccttaagtaagcaa

SEQ ID NO: 5539 - DNA, 21 bp, synthetic construct
  misc_feature 1..21: note = Synthetic construct
  source 1..21: mol_type = other DNA
ttcgtcccttaagtaagcaat

SEQ ID NO: 5540 - DNA, 21 bp, synthetic construct
  misc_feature 1..21: note = Synthetic construct
  source 1..21: mol_type = other DNA
tcgtcccttaagtaagcaatt

SEQ ID NO: 5541 - DNA, 21 bp, synthetic construct
  misc_feature 1..21: note = Synthetic construct
  source 1..21: mol_type = other DNA
cgtcccttaagtaagcaattg

SEQ ID NO: 5542 - DNA, 21 bp, synthetic construct
  misc_feature 1..21: note = Synthetic construct
  source 1..21: mol_type = other DNA
gtcccttaagtaagcaattgc

SEQ ID NO: 5543 - DNA, 21 bp, synthetic construct
  misc_feature 1..21: note = Synthetic construct
  source 1..21: mol_type = other DNA
tcccttaagtaagcaattgct

SEQ ID NO: 5544 - DNA, 21 bp, synthetic construct
  misc_feature 1..21: note = Synthetic construct
  source 1..21: mol_type = other DNA
cccttaagtaagcaattgctg

SEQ ID NO: 5545 - DNA, 21 bp, synthetic construct
  misc_feature 1..21: note = Synthetic construct
  source 1..21: mol_type = other DNA
ccttaagtaagcaattgctgt

SEQ ID NO: 5546 - DNA, 21 bp, synthetic construct
  misc_feature 1..21: note = Synthetic construct
  source 1..21: mol_type = other DNA
cttaagtaagcaattgctgta

SEQ ID NO: 5547 - DNA, 21 bp, synthetic construct
  misc_feature 1..21: note = Synthetic construct
  source 1..21: mol_type = other DNA
ttaagtaagcaattgctgtaa

SEQ ID NO: 5548 - DNA, 21 bp, synthetic construct
  misc_feature 1..21: note = Synthetic construct
  source 1..21: mol_type = other DNA
taagtaagcaattgctgtaaa

SEQ ID NO: 5549 - DNA, 21 bp, synthetic construct
  misc_feature 1..21: note = Synthetic construct
  source 1..21: mol_type = other DNA
aagtaagcaattgctgtaaag

SEQ ID NO: 5550 - DNA, 21 bp, synthetic construct
  misc_feature 1..21: note = Synthetic construct
  source 1..21: mol_type = other DNA
agtaagcaattgctgtaaagt

SEQ ID NO: 5551 - DNA, 21 bp, synthetic construct
  misc_feature 1..21: note = Synthetic construct
  source 1..21: mol_type = other DNA
gtaagcaattgctgtaaagtc

SEQ ID NO: 5552 - DNA, 21 bp, synthetic construct
  misc_feature 1..21: note = Synthetic construct
  source 1..21: mol_type = other DNA
taagcaattgctgtaaagtcg

SEQ ID NO: 5553 - DNA, 21 bp, synthetic construct
  misc_feature 1..21: note = Synthetic construct
  source 1..21: mol_type = other DNA
aagcaattgctgtaaagtcgt

SEQ ID NO: 5554 - DNA, 21 bp, synthetic construct
  misc_feature 1..21: note = Synthetic construct
  source 1..21: mol_type = other DNA
agcaattgctgtaaagtcgtc

SEQ ID NO: 5555 - DNA, 21 bp, synthetic construct
  misc_feature 1..21: note = Synthetic construct
  source 1..21: mol_type = other DNA
gcaattgctgtaaagtcgtca

SEQ ID NO: 5556 - DNA, 21 bp, synthetic construct
  misc_feature 1..21: note = Synthetic construct
  source 1..21: mol_type = other DNA
caattgctgtaaagtcgtcac

SEQ ID NO: 5557 - DNA, 21 bp, synthetic construct
  misc_feature 1..21: note = Synthetic construct
  source 1..21: mol_type = other DNA
aattgctgtaaagtcgtcact

SEQ ID NO: 5558 - DNA, 21 bp, synthetic construct
  misc_feature 1..21: note = Synthetic construct
  source 1..21: mol_type = other DNA
attgctgtaaagtcgtcactg

SEQ ID NO: 5559 - DNA, 21 bp, synthetic construct
  misc_feature 1..21: note = Synthetic construct
  source 1..21: mol_type = other DNA
ttgctgtaaagtcgtcactgt

SEQ ID NO: 5560 - DNA, 21 bp, synthetic construct
  misc_feature 1..21: note = Synthetic construct
  source 1..21: mol_type = other DNA
tgctgtaaagtcgtcactgtg

SEQ ID NO: 5561 - DNA, 21 bp, synthetic construct
  misc_feature 1..21: note = Synthetic construct
  source 1..21: mol_type = other DNA
gctgtaaagtcgtcactgtgc

SEQ ID NO: 5562 - DNA, 21 bp, synthetic construct
  misc_feature 1..21: note = Synthetic construct
  source 1..21: mol_type = other DNA
ctgtaaagtcgtcactgtgcg

SEQ ID NO: 5563 - DNA, 21 bp, synthetic construct
  misc_feature 1..21: note = Synthetic construct
  source 1..21: mol_type = other DNA
tgtaaagtcgtcactgtgcgg

SEQ ID NO: 5564 - DNA, 21 bp, synthetic construct
  misc_feature 1..21: note = Synthetic construct
  source 1..21: mol_type = other DNA
gtaaagtcgtcactgtgcgga

SEQ ID NO: 5565 - DNA, 21 bp, synthetic construct
  misc_feature 1..21: note = Synthetic construct
  source 1..21: mol_type = other DNA
taaagtcgtcactgtgcggat

SEQ ID NO: 5566 - DNA, 21 bp, synthetic construct
  misc_feature 1..21: note = Synthetic construct
  source 1..21: mol_type = other DNA
aaagtcgtcactgtgcggatc

SEQ ID NO: 5567 - DNA, 21 bp, synthetic construct
  misc_feature 1..21: note = Synthetic construct
  source 1..21: mol_type = other DNA
aagtcgtcactgtgcggatca

SEQ ID NO: 5568 - DNA, 21 bp, synthetic construct
  misc_feature 1..21: note = Synthetic construct
  source 1..21: mol_type = other DNA
agtcgtcactgtgcggatcac

SEQ ID NO: 5569 - DNA, 21 bp, synthetic construct
  misc_feature 1..21: note = Synthetic construct
  source 1..21: mol_type = other DNA
gtcgtcactgtgcggatcacc

SEQ ID NO: 5570 - DNA, 21 bp, synthetic construct
  misc_feature 1..21: note = Synthetic construct
  source 1..21: mol_type = other DNA
tcgtcactgtgcggatcaccg

SEQ ID NO: 5571 - DNA, 21 bp, synthetic construct
  misc_feature 1..21: note = Synthetic construct
  source 1..21: mol_type = other DNA
cgtcactgtgcggatcaccgc

SEQ ID NO: 5572 - DNA, 21 bp, synthetic construct
  misc_feature 1..21: note = Synthetic construct
  source 1..21: mol_type = other DNA
gtcactgtgcggatcaccgct

SEQ ID NO: 5573 - DNA, 21 bp, synthetic construct
  misc_feature 1..21: note = Synthetic construct
  source 1..21: mol_type = other DNA
tcactgtgcggatcaccgctt

SEQ ID NO: 5574 - DNA, 21 bp, synthetic construct
  misc_feature 1..21: note = Synthetic construct
  source 1..21: mol_type = other DNA
cactgtgcggatcaccgcttc

SEQ ID NO: 5575 - DNA, 21 bp, synthetic construct
  misc_feature 1..21: note = Synthetic construct
  source 1..21: mol_type = other DNA
actgtgcggatcaccgcttcc

SEQ ID NO: 5576 - DNA, 21 bp, synthetic construct
  misc_feature 1..21: note = Synthetic construct
  source 1..21: mol_type = other DNA
ctgtgcggatcaccgcttcca

SEQ ID NO: 5577 - DNA, 21 bp, synthetic construct
  misc_feature 1..21: note = Synthetic construct
  source 1..21: mol_type = other DNA
tgtgcggatcaccgcttccag

SEQ ID NO: 5578 - DNA, 21 bp, synthetic construct
  misc_feature 1..21: note = Synthetic construct
  source 1..21: mol_type = other DNA
gtgcggatcaccgcttccagt

SEQ ID NO: 5579 - DNA, 21 bp, synthetic construct
  misc_feature 1..21: note = Synthetic construct
  source 1..21: mol_type = other DNA
tgcggatcaccgcttccagta

SEQ ID NO: 5580 - DNA, 21 bp, synthetic construct
  misc_feature 1..21: note = Synthetic construct
  source 1..21: mol_type = other DNA
gcggatcaccgcttccagtag

SEQ ID NO: 5581 - DNA, 21 bp, synthetic construct
  misc_feature 1..21: note = Synthetic construct
  source 1..21: mol_type = other DNA
cggatcaccgcttccagtagc

SEQ ID NO: 5582 - DNA, 21 bp, synthetic construct
  misc_feature 1..21: note = Synthetic construct
  source 1..21: mol_type = other DNA
ggatcaccgcttccagtagcg

SEQ ID NO: 5583 - DNA, 21 bp, synthetic construct
  misc_feature 1..21: note = Synthetic construct
  source 1..21: mol_type = other DNA
gatcaccgcttccagtagcga

SEQ ID NO: 5584 - DNA, 21 bp, synthetic construct
  misc_feature 1..21: note = Synthetic construct
  source 1..21: mol_type = other DNA
atcaccgcttccagtagcgac

SEQ ID NO: 5585 - DNA, 21 bp, synthetic construct
  misc_feature 1..21: note = Synthetic construct
  source 1..21: mol_type = other DNA
tcaccgcttccagtagcgaca

SEQ ID NO: 5586 - DNA, 21 bp, synthetic construct
  misc_feature 1..21: note = Synthetic construct
  source 1..21: mol_type = other DNA
caccgcttccagtagcgacag

SEQ ID NO: 5587 - DNA, 21 bp, synthetic construct
  misc_feature 1..21: note = Synthetic construct
  source 1..21: mol_type = other DNA
accgcttccagtagcgacaga

SEQ ID NO: 5588 - DNA, 21 bp, synthetic construct
  misc_feature 1..21: note = Synthetic construct
  source 1..21: mol_type = other DNA
ccgcttccagtagcgacagaa

SEQ ID NO: 5589 - DNA, 21 bp, synthetic construct
  misc_feature 1..21: note = Synthetic construct
  source 1..21: mol_type = other DNA
cgcttccagtagcgacagaag

SEQ ID NO: 5590 - DNA, 21 bp, synthetic construct
  misc_feature 1..21: note = Synthetic construct
  source 1..21: mol_type = other DNA
gcttccagtagcgacagaagc

SEQ ID NO: 5591 - DNA, 21 bp, synthetic construct
  misc_feature 1..21: note = Synthetic construct
  source 1..21: mol_type = other DNA
cttccagtagcgacagaagca

SEQ ID NO: 5592 - DNA, 21 bp, synthetic construct
  misc_feature 1..21: note = Synthetic construct
  source 1..21: mol_type = other DNA
ttccagtagcgacagaagcaa

SEQ ID NO: 5593 - DNA, 21 bp, synthetic construct
  misc_feature 1..21: note = Synthetic construct
  source 1..21: mol_type = other DNA
tccagtagcgacagaagcaat

SEQ ID NO: 5594 - DNA, 21 bp, synthetic construct
  misc_feature 1..21: note = Synthetic construct
  source 1..21: mol_type = other DNA
ccagtagcgacagaagcaatt

SEQ ID NO: 5595 - DNA, 21 bp, synthetic construct
  misc_feature 1..21: note = Synthetic construct
  source 1..21: mol_type = other DNA
cagtagcgacagaagcaattg

SEQ ID NO: 5596 - DNA, 21 bp, synthetic construct
  misc_feature 1..21: note = Synthetic construct
  source 1..21: mol_type = other DNA
agtagcgacagaagcaattga

SEQ ID NO: 5597 - DNA, 21 bp, synthetic construct
  misc_feature 1..21: note = Synthetic construct
  source 1..21: mol_type = other DNA
gtagcgacagaagcaattgat

SEQ ID NO: 5598 - DNA, 21 bp, synthetic construct
  misc_feature 1..21: note = Synthetic construct
  source 1..21: mol_type = other DNA
tagcgacagaagcaattgatt

SEQ ID NO: 5599 - DNA, 21 bp, synthetic construct
  misc_feature 1..21: note = Synthetic construct
  source 1..21: mol_type = other DNA
agcgacagaagcaattgattg

SEQ ID NO: 5600 - DNA, 21 bp, synthetic construct
  misc_feature 1..21: note = Synthetic construct
  source 1..21: mol_type = other DNA
gcgacagaagcaattgattgg

SEQ ID NO: 5601 - DNA, 21 bp, synthetic construct
  misc_feature 1..21: note = Synthetic construct
  source 1..21: mol_type = other DNA
cgacagaagcaattgattggt

SEQ ID NO: 5602 - DNA, 21 bp, synthetic construct
  misc_feature 1..21: note = Synthetic construct
  source 1..21: mol_type = other DNA
gacagaagcaattgattggta

SEQ ID NO: 5603 - DNA, 21 bp, synthetic construct
  misc_feature 1..21: note = Synthetic construct
  source 1..21: mol_type = other DNA
acagaagcaattgattggtaa

SEQ ID NO: 5604 - DNA, 21 bp, synthetic construct
  misc_feature 1..21: note = Synthetic construct
  source 1..21: mol_type = other DNA
cagaagcaattgattggtaaa

SEQ ID NO: 5605 - DNA, 21 bp, synthetic construct
  misc_feature 1..21: note = Synthetic construct
  source 1..21: mol_type = other DNA
agaagcaattgattggtaaat

SEQ ID NO: 5606 - DNA, 21 bp, synthetic construct
  misc_feature 1..21: note = Synthetic construct
  source 1..21: mol_type = other DNA
gaagcaattgattggtaaatt

SEQ ID NO: 5607 - DNA, 21 bp, synthetic construct
  misc_feature 1..21: note = Synthetic construct
  source 1..21: mol_type = other DNA
aagcaattgattggtaaattt

SEQ ID NO: 5608 - DNA, 21 bp, synthetic construct
  misc_feature 1..21: note = Synthetic construct
  source 1..21: mol_type = other DNA
agcaattgattggtaaatttc

SEQ ID NO: 5609 - DNA, 21 bp, synthetic construct
  misc_feature 1..21: note = Synthetic construct
  source 1..21: mol_type = other DNA
gcaattgattggtaaatttcg

SEQ ID NO: 5610 - DNA, 21 bp, synthetic construct
  misc_feature 1..21: note = Synthetic construct
  source 1..21: mol_type = other DNA
caattgattggtaaatttcga

SEQ ID NO: 5611 - DNA, 21 bp, synthetic construct
  misc_feature 1..21: note = Synthetic construct
  source 1..21: mol_type = other DNA
aattgattggtaaatttcgag

SEQ ID NO: 5612 - DNA, 21 bp, synthetic construct
  misc_feature 1..21: note = Synthetic construct
  source 1..21: mol_type = other DNA
attgattggtaaatttcgaga

SEQ ID NO: 5613 - DNA, 21 bp, synthetic construct
  misc_feature 1..21: note = Synthetic construct
  source 1..21: mol_type = other DNA
ttgattggtaaatttcgagag

SEQ ID NO: 5614 - DNA, 21 bp, synthetic construct
  misc_feature 1..21: note = Synthetic construct
  source 1..21: mol_type = other DNA
tgattggtaaatttcgagaga

SEQ ID NO: 5615 - DNA, 21 bp, synthetic construct
  misc_feature 1..21: note = Synthetic construct
  source 1..21: mol_type = other DNA
gattggtaaatttcgagagaa

SEQ ID NO: 5616 - DNA, 21 bp, synthetic construct
  misc_feature 1..21: note = Synthetic construct
  source 1..21: mol_type = other DNA
attggtaaatttcgagagaaa

SEQ ID NO: 5617 - DNA, 21 bp, synthetic construct
  misc_feature 1..21: note = Synthetic construct
  source 1..21: mol_type = other DNA
ttggtaaatttcgagagaaag

SEQ ID NO: 5618 - DNA, 21 bp, synthetic construct
  misc_feature 1..21: note = Synthetic construct
  source 1..21: mol_type = other DNA
tggtaaatttcgagagaaaga

SEQ ID NO: 5619 - DNA, 21 bp, synthetic construct
  misc_feature 1..21: note = Synthetic construct
  source 1..21: mol_type = other DNA
ggtaaatttcgagagaaagat

SEQ ID NO: 5620 - DNA, 21 bp, synthetic construct
  misc_feature 1..21: note = Synthetic construct
  source 1..21: mol_type = other DNA
gtaaatttcgagagaaagatc

SEQ ID NO: 5621 - DNA, 21 bp, synthetic construct
  misc_feature 1..21: note = Synthetic construct
  source 1..21: mol_type = other DNA
taaatttcgagagaaagatcg

SEQ ID NO: 5622 - DNA, 21 bp, synthetic construct
  misc_feature 1..21: note = Synthetic construct
  source 1..21: mol_type = other DNA
aaatttcgagagaaagatcgc

SEQ ID NO: 5623 - DNA, 21 bp, synthetic construct
  misc_feature 1..21: note = Synthetic construct
  source 1..21: mol_type = other DNA
aatttcgagagaaagatcgcg

SEQ ID NO: 5624 - DNA, 21 bp, synthetic construct
  misc_feature 1..21: note = Synthetic construct
  source 1..21: mol_type = other DNA
atttcgagagaaagatcgcga

SEQ ID NO: 5625 - DNA, 21 bp, synthetic construct
  misc_feature 1..21: note = Synthetic construct
  source 1..21: mol_type = other DNA
tttcgagagaaagatcgcgag

SEQ ID NO: 5626 - DNA, 21 bp, synthetic construct
  misc_feature 1..21: note = Synthetic construct
  source 1..21: mol_type = other DNA
ttcgagagaaagatcgcgagg

SEQ ID NO: 5627 - DNA, 21 bp, synthetic construct
  misc_feature 1..21: note = Synthetic construct
  source 1..21: mol_type = other DNA
tcgagagaaagatcgcgagga

SEQ ID NO: 5628 - DNA, 21 bp, synthetic construct
  misc_feature 1..21: note = Synthetic construct
  source 1..21: mol_type = other DNA
cgagagaaagatcgcgaggaa

SEQ ID NO: 5629 - DNA, 21 bp, synthetic construct
  misc_feature 1..21: note = Synthetic construct
  source 1..21: mol_type = other DNA
gagagaaagatcgcgaggaag

SEQ ID NO: 5630 - DNA, 21 bp, synthetic construct
  misc_feature 1..21: note = Synthetic construct
  source 1..21: mol_type = other DNA
agagaaagatcgcgaggaaga

SEQ ID NO: 5631 - DNA, 21 bp, synthetic construct
  misc_feature 1..21: note = Synthetic construct
  source 1..21: mol_type = other DNA
gagaaagatcgcgaggaagat

SEQ ID NO: 5632 - DNA, 21 bp, synthetic construct
  misc_feature 1..21: note = Synthetic construct
  source 1..21: mol_type = other DNA
agaaagatcgcgaggaagatc

SEQ ID NO: 5633 - DNA, 21 bp, synthetic construct
  misc_feature 1..21: note = Synthetic construct
  source 1..21: mol_type = other DNA
gaaagatcgcgaggaagatca

SEQ ID NO: 5634 - DNA, 21 bp, synthetic construct
  misc_feature 1..21: note = Synthetic construct
  source 1..21: mol_type = other DNA
aaagatcgcgaggaagatcaa

SEQ ID NO: 5635 - DNA, 21 bp, synthetic construct
  misc_feature 1..21: note = Synthetic construct
  source 1..21: mol_type = other DNA
aagatcgcgaggaagatcaat

SEQ ID NO: 5636 - DNA, 21 bp, synthetic construct
  misc_feature 1..21: note = Synthetic construct
  source 1..21: mol_type = other DNA
agatcgcgaggaagatcaata

SEQ ID NO: 5637 - DNA, 21 bp, synthetic construct
  misc_feature 1..21: note = Synthetic construct
  source 1..21: mol_type = other DNA
gatcgcgaggaagatcaatac

SEQ ID NO: 5638 - DNA, 21 bp, synthetic construct
  misc_feature 1..21: note = Synthetic construct
  source 1..21: mol_type = other DNA
atcgcgaggaagatcaataca

SEQ ID NO: 5639 - DNA, 21 bp, synthetic construct
  misc_feature 1..21: note = Synthetic construct
  source 1..21: mol_type = other DNA
tcgcgaggaagatcaatacat

SEQ ID NO: 5640 - DNA, 21 bp, synthetic construct
  misc_feature 1..21: note = Synthetic construct
  source 1..21: mol_type = other DNA
cgcgaggaagatcaatacata

SEQ ID NO: 5641 - DNA, 21 bp, synthetic construct
  misc_feature 1..21: note = Synthetic construct
  source 1..21: mol_type = other DNA
gcgaggaagatcaatacataa

SEQ ID NO: 5642 - DNA, 21 bp, synthetic construct
  misc_feature 1..21: note = Synthetic construct
  source 1..21: mol_type = other DNA
cgaggaagatcaatacataaa

SEQ ID NO: 5643 - DNA, 21 bp, synthetic construct
  misc_feature 1..21: note = Synthetic construct
  source 1..21: mol_type = other DNA
gaggaagatcaatacataaag

SEQ ID NO: 5644 - DNA, 21 bp, synthetic construct
  misc_feature 1..21: note = Synthetic construct
  source 1..21: mol_type = other DNA
aggaagatcaatacataaaga

SEQ ID NO: 5645 - DNA, 21 bp, synthetic construct
  misc_feature 1..21: note = Synthetic construct
  source 1..21: mol_type = other DNA
ggaagatcaatacataaagag

SEQ ID NO: 5646 - DNA, 21 bp, synthetic construct
  misc_feature 1..21: note = Synthetic construct
  source 1..21: mol_type = other DNA
gaagatcaatacataaagagt

SEQ ID NO: 5647 - DNA, 21 bp, synthetic construct
  misc_feature 1..21: note = Synthetic construct
  source 1..21: mol_type = other DNA
aagatcaatacataaagagtt

SEQ ID NO: 5648 - DNA, 21 bp, synthetic construct
  misc_feature 1..21: note = Synthetic construct
  source 1..21: mol_type = other DNA
agatcaatacataaagagttg

SEQ ID NO: 5649 - DNA, 21 bp, synthetic construct
  misc_feature 1..21: note = Synthetic construct
  source 1..21: mol_type = other DNA
gatcaatacataaagagttga

SEQ ID NO: 5650 - DNA, 21 bp, synthetic construct
  misc_feature 1..21: note = Synthetic construct
  source 1..21: mol_type = other DNA
atcaatacataaagagttgaa

SEQ ID NO: 5651 - DNA, 21 bp, synthetic construct
  misc_feature 1..21: note = Synthetic construct
  source 1..21: mol_type = other DNA
tcaatacataaagagttgaac

SEQ ID NO: 5652 - DNA, 21 bp, synthetic construct
  misc_feature 1..21: note = Synthetic construct
  source 1..21: mol_type = other DNA
caatacataaagagttgaact

SEQ ID NO: 5653 - DNA, 21 bp, synthetic construct
  misc_feature 1..21: note = Synthetic construct
  source 1..21: mol_type = other DNA
aatacataaagagttgaactt

SEQ ID NO: 5654 - DNA, 21 bp, synthetic construct
  misc_feature 1..21: note = Synthetic construct
  source 1..21: mol_type = other DNA
atacataaagagttgaacttc

SEQ ID NO: 5655 - DNA, 21 bp, synthetic construct
  misc_feature 1..21: note = Synthetic construct
  source 1..21: mol_type = other DNA
tacataaagagttgaacttct

SEQ ID NO: 5656 - DNA, 21 bp, synthetic construct
  misc_feature 1..21: note = Synthetic construct
  source 1..21: mol_type = other DNA
acataaagagttgaacttctt

SEQ ID NO: 5657 - DNA, 21 bp, synthetic construct
  misc_feature 1..21: note = Synthetic construct
  source 1..21: mol_type = other DNA
cataaagagttgaacttcttt

SEQ ID NO: 5658 - DNA, 21 bp, synthetic construct
  misc_feature 1..21: note = Synthetic construct
  source 1..21: mol_type = other DNA
ataaagagttgaacttctttg

SEQ ID NO: 5659 - DNA, 21 bp, synthetic construct
  misc_feature 1..21: note = Synthetic construct
  source 1..21: mol_type = other DNA
taaagagttgaacttctttgt

SEQ ID NO: 5660 - DNA, 21 bp, synthetic construct
  misc_feature 1..21: note = Synthetic construct
  source 1..21: mol_type = other DNA
aaagagttgaacttctttgtt

SEQ ID NO: 5661 - DNA, 21 bp, synthetic construct
  misc_feature 1..21: note = Synthetic construct
  source 1..21: mol_type = other DNA
aagagttgaacttctttgttg

SEQ ID NO: 5662 - DNA, 21 bp, synthetic construct
  misc_feature 1..21: note = Synthetic construct
  source 1..21: mol_type = other DNA
agagttgaacttctttgttgt

SEQ ID NO: 5663 - DNA, 21 bp, synthetic construct
  misc_feature 1..21: note = Synthetic construct
  source 1..21: mol_type = other DNA
gagttgaacttctttgttgtc

SEQ ID NO: 5664 - DNA, 21 bp, synthetic construct
  misc_feature 1..21: note = Synthetic construct
  source 1..21: mol_type = other DNA
agttgaacttctttgttgtct

SEQ ID NO: 5665 - DNA, 21 bp, synthetic construct
  misc_feature 1..21: note = Synthetic construct
  source 1..21: mol_type = other DNA
gttgaacttctttgttgtctt

SEQ ID NO: 5666 - DNA, 21 bp, synthetic construct
  misc_feature 1..21: note = Synthetic construct
  source 1..21: mol_type = other DNA
ttgaacttctttgttgtcttc

SEQ ID NO: 5667 - DNA, 21 bp, synthetic construct
  misc_feature 1..21: note = Synthetic construct
  source 1..21: mol_type = other DNA
tgaacttctttgttgtcttcg

SEQ ID NO: 5668 - DNA, 21 bp, synthetic construct
  misc_feature 1..21: note = Synthetic construct
  source 1..21: mol_type = other DNA
gaacttctttgttgtcttcga

SEQ ID NO: 5669 - DNA, 21 bp, synthetic construct
  misc_feature 1..21: note = Synthetic construct
  source 1..21: mol_type = other DNA
aacttctttgttgtcttcgac

SEQ ID NO: 5670 - DNA, 21 bp, synthetic construct
  misc_feature 1..21: note = Synthetic construct
  source 1..21: mol_type = other DNA
acttctttgttgtcttcgaca

SEQ ID NO: 5671 - DNA, 21 bp, synthetic construct
  misc_feature 1..21: note = Synthetic construct
  source 1..21: mol_type = other DNA
cttctttgttgtcttcgacat

SEQ ID NO: 5672 - DNA, 21 bp, synthetic construct
  misc_feature 1..21: note = Synthetic construct
  source 1..21: mol_type = other DNA
ttctttgttgtcttcgacatg

SEQ ID NO: 5673 - DNA, 21 bp, synthetic construct
  misc_feature 1..21: note = Synthetic construct
  source 1..21: mol_type = other DNA
tctttgttgtcttcgacatgg

SEQ ID NO: 5674 - DNA, 21 bp, synthetic construct
  misc_feature 1..21: note = Synthetic construct
  source 1..21: mol_type = other DNA
ctttgttgtcttcgacatggg

SEQ ID NO: 5675 - DNA, 21 bp, synthetic construct
  misc_feature 1..21: note = Synthetic construct
  source 1..21: mol_type = other DNA
tttgttgtcttcgacatgggt

SEQ ID NO: 5676 - DNA, 21 bp, synthetic construct
  misc_feature 1..21: note = Synthetic construct
  source 1..21: mol_type = other DNA
ttgttgtcttcgacatgggta

SEQ ID NO: 5677 - DNA, 21 bp, synthetic construct
  misc_feature 1..21: note = Synthetic construct
  source 1..21: mol_type = other DNA
tgttgtcttcgacatgggtaa

SEQ ID NO: 5678 - DNA, 21 bp, synthetic construct
  misc_feature 1..21: note = Synthetic construct
  source 1..21: mol_type = other DNA
gttgtcttcgacatgggtaat

SEQ ID NO: 5679 - DNA, 21 bp, synthetic construct
  misc_feature 1..21: note = Synthetic construct
  source 1..21: mol_type = other DNA
ttgtcttcgacatgggtaatc

SEQ ID NO: 5680 - DNA, 21 bp, synthetic construct
  misc_feature 1..21: note = Synthetic construct
  source 1..21: mol_type = other DNA
tgtcttcgacatgggtaatcc

SEQ ID NO: 5681 - DNA, 21 bp, synthetic construct
  misc_feature 1..21: note = Synthetic construct
  source 1..21: mol_type = other DNA
gtcttcgacatgggtaatcct

SEQ ID NO: 5682 - DNA, 21 bp, synthetic construct
  misc_feature 1..21: note = Synthetic construct
  source 1..21: mol_type = other DNA
tcttcgacatgggtaatcctc

SEQ ID NO: 5683 - DNA, 21 bp, synthetic construct
  misc_feature 1..21: note = Synthetic construct
  source 1..21: mol_type = other DNA
cttcgacatgggtaatcctca

SEQ ID NO: 5684 - DNA, 21 bp, synthetic construct
  misc_feature 1..21: note = Synthetic construct
  source 1..21: mol_type = other DNA
ttcgacatgggtaatcctcat

SEQ ID NO: 5685 - DNA, 21 bp, synthetic construct
  misc_feature 1..21: note = Synthetic construct
  source 1..21: mol_type = other DNA
tcgacatgggtaatcctcatg

SEQ ID NO: 5686 - DNA, 21 bp, synthetic construct
  misc_feature 1..21: note = Synthetic construct
  source 1..21: mol_type = other DNA
cgacatgggtaatcctcatgt

SEQ ID NO: 5687 - DNA, 21 bp, synthetic construct
  misc_feature 1..21: note = Synthetic construct
  source 1..21: mol_type = other DNA
gacatgggtaatcctcatgtt

SEQ ID NO: 5688 - DNA, 21 bp, synthetic construct
  misc_feature 1..21: note = Synthetic construct
  source 1..21: mol_type = other DNA
acatgggtaatcctcatgttt

SEQ ID NO: 5689 - DNA, 21 bp, synthetic construct
  misc_feature 1..21: note = Synthetic construct
  source 1..21: mol_type = other DNA
catgggtaatcctcatgtttg

SEQ ID NO: 5690 - DNA, 21 bp, synthetic construct
  misc_feature 1..21: note = Synthetic construct
  source 1..21: mol_type = other DNA
atgggtaatcctcatgtttga

SEQ ID NO: 5691 - DNA, 21 bp, synthetic construct
  misc_feature 1..21: note = Synthetic construct
  source 1..21: mol_type = other DNA
tgggtaatcctcatgtttgaa

SEQ ID NO: 5692 - DNA, 21 bp, synthetic construct
  misc_feature 1..21: note = Synthetic construct
  source 1..21: mol_type = other DNA
gggtaatcctcatgtttgaat

SEQ ID NO: 5693 - DNA, 21 bp, synthetic construct
  misc_feature 1..21: note = Synthetic construct
  source 1..21: mol_type = other DNA
ggtaatcctcatgtttgaatg

SEQ ID NO: 5694 - DNA, 21 bp, synthetic construct
  misc_feature 1..21: note = Synthetic construct
  source 1..21: mol_type = other DNA
gtaatcctcatgtttgaatgg

SEQ ID NO: 5695 - DNA, 21 bp, synthetic construct
  misc_feature 1..21: note = Synthetic construct
  source 1..21: mol_type = other DNA
taatcctcatgtttgaatggc

SEQ ID NO: 5696 - DNA, 21 bp, synthetic construct
  misc_feature 1..21: note = Synthetic construct
  source 1..21: mol_type = other DNA
aatcctcatgtttgaatggcc

SEQ ID NO: 5697 - DNA, 21 bp, synthetic construct
  misc_feature 1..21: note = Synthetic construct
  source 1..21: mol_type = other DNA
atcctcatgtttgaatggccg

SEQ ID NO: 5698 - DNA, 21 bp, synthetic construct
  misc_feature 1..21: note = Synthetic construct
  source 1..21: mol_type = other DNA
tcctcatgtttgaatggccgg

SEQ ID NO: 5699 - DNA, 21 bp, synthetic construct
  misc_feature 1..21: note = Synthetic construct
  source 1..21: mol_type = other DNA
cctcatgtttgaatggccggc

SEQ ID NO: 5700 - DNA, 21 bp, synthetic construct
  misc_feature 1..21: note = Synthetic construct
  source 1..21: mol_type = other DNA
ctcatgtttgaatggccggcg

SEQ ID NO: 5701 - DNA, 21 bp, synthetic construct
  misc_feature 1..21: note = Synthetic construct
  source 1..21: mol_type = other DNA
tcatgtttgaatggccggcgt

SEQ ID NO: 5702 - DNA, 21 bp, synthetic construct
  misc_feature 1..21: note = Synthetic construct
  source 1..21: mol_type = other DNA
catgtttgaatggccggcgtc

SEQ ID NO: 5703 - DNA, 21 bp, synthetic construct
  misc_feature 1..21: note = Synthetic construct
  source 1..21: mol_type = other DNA
atgtttgaatggccggcgtct

SEQ ID NO: 5704 - DNA, 21 bp, synthetic construct
  misc_feature 1..21: note = Synthetic construct
  source 1..21: mol_type = other DNA
tgtttgaatggccggcgtcta

SEQ ID NO: 5705 - DNA, 21 bp, synthetic construct
  misc_feature 1..21: note = Synthetic construct
  source 1..21: mol_type = other DNA
gtttgaatggccggcgtctat

SEQ ID NO: 5706 - DNA, 21 bp, synthetic construct
  misc_feature 1..21: note = Synthetic construct
  source 1..21: mol_type = other DNA
tttgaatggccggcgtctatt

SEQ ID NO: 5707 - DNA, 21 bp, synthetic construct
  misc_feature 1..21: note = Synthetic construct
  source 1..21: mol_type = other DNA
ttgaatggccggcgtctatta

SEQ ID NO: 5708 - DNA, 21 bp, synthetic construct
  misc_feature 1..21: note = Synthetic construct
  source 1..21: mol_type = other DNA
tgaatggccggcgtctattag

SEQ ID NO: 5709 - DNA, 21 bp, synthetic construct
  misc_feature 1..21: note = Synthetic construct
  source 1..21: mol_type = other DNA
gaatggccggcgtctattagt

SEQ ID NO: 5710 - DNA, 21 bp, synthetic construct
  misc_feature 1..21: note = Synthetic construct
  source 1..21: mol_type = other DNA
aatggccggcgtctattagta

SEQ ID NO: 5711 - DNA, 21 bp, synthetic construct
  misc_feature 1..21: note = Synthetic construct
  source 1..21: mol_type = other DNA
atggccggcgtctattagtag

SEQ ID NO: 5712 - DNA, 21 bp, synthetic construct
  misc_feature 1..21: note = Synthetic construct
  source 1..21: mol_type = other DNA
tggccggcgtctattagtaga

SEQ ID NO: 5713 - DNA, 21 bp, synthetic construct
  misc_feature 1..21: note = Synthetic construct
  source 1..21: mol_type = other DNA
ggccggcgtctattagtagat

SEQ ID NO: 5714 - DNA, 21 bp, synthetic construct
  misc_feature 1..21: note = Synthetic construct
  source 1..21: mol_type = other DNA
gccggcgtctattagtagatg

SEQ ID NO: 5715 - DNA, 21 bp, synthetic construct
  misc_feature 1..21: note = Synthetic construct
  source 1..21: mol_type = other DNA
ccggcgtctattagtagatgc

SEQ ID NO: 5716 - DNA, 21 bp, synthetic construct
  misc_feature 1..21: note = Synthetic construct
  source 1..21: mol_type = other DNA
cggcgtctattagtagatgcc

SEQ ID NO: 5717 - DNA, 21 bp, synthetic construct
  misc_feature 1..21: note = Synthetic construct
  source 1..21: mol_type = other DNA
ggcgtctattagtagatgccg

SEQ ID NO: 5718 - DNA, 21 bp, synthetic construct
  misc_feature 1..21: note = Synthetic construct
  source 1..21: mol_type = other DNA
gcgtctattagtagatgccgg

SEQ ID NO: 5719 - DNA, 21 bp, synthetic construct
  misc_feature 1..21: note = Synthetic construct
  source 1..21: mol_type = other DNA
cgtctattagtagatgccgga

SEQ ID NO: 5720 - DNA, 21 bp, synthetic construct
  misc_feature 1..21: note = Synthetic construct
  source 1..21: mol_type = other DNA
gtctattagtagatgccggag

SEQ ID NO: 5721 - DNA, 21 bp, synthetic construct
  misc_feature 1..21: note = Synthetic construct
  source 1..21: mol_type = other DNA
tctattagtagatgccggagt

SEQ ID NO: 5722 - DNA, 21 bp, synthetic construct
  misc_feature 1..21: note = Synthetic construct
  source 1..21: mol_type = other DNA
ctattagtagatgccggagtt

SEQ ID NO: 5723 - DNA, 21 bp, synthetic construct
  misc_feature 1..21: note = Synthetic construct
  source 1..21: mol_type = other DNA
tattagtagatgccggagttt

SEQ ID NO: 5724 - DNA, 21 bp, synthetic construct
  misc_feature 1..21: note = Synthetic construct
  source 1..21: mol_type = other DNA
attagtagatgccggagtttg

SEQ ID NO: 5725 - DNA, 21 bp, synthetic construct
  misc_feature 1..21: note = Synthetic construct
  source 1..21: mol_type = other DNA
ttagtagatgccggagtttgc

SEQ ID NO: 5726 - DNA, 21 bp, synthetic construct
  misc_feature 1..21: note = Synthetic construct
  source 1..21: mol_type = other DNA
tagtagatgccggagtttgct

SEQ ID NO: 5727 - DNA, 21 bp, synthetic construct
  misc_feature 1..21: note = Synthetic construct
  source 1..21: mol_type = other DNA
agtagatgccggagtttgctg

SEQ ID NO: 5728 - DNA, 21 bp, synthetic construct
  misc_feature 1..21: note = Synthetic construct
  source 1..21: mol_type = other DNA
gtagatgccggagtttgctgc

SEQ ID NO: 5729 - DNA, 21 bp, synthetic construct
  misc_feature 1..21: note = Synthetic construct
  source 1..21: mol_type = other DNA
tagatgccggagtttgctgcg

SEQ ID NO: 5730 - DNA, 21 bp, synthetic construct
  misc_feature 1..21: note = Synthetic construct
  source 1..21: mol_type = other DNA
agatgccggagtttgctgcga

SEQ ID NO: 5731 - DNA, 21 bp, synthetic construct
  misc_feature 1..21: note = Synthetic construct
  source 1..21: mol_type = other DNA
gatgccggagtttgctgcgat

SEQ ID NO: 5732 - DNA, 21 bp, synthetic construct
  misc_feature 1..21: note = Synthetic construct
  source 1..21: mol_type = other DNA
atgccggagtttgctgcgatt

SEQ ID NO: 5733 - DNA, 21 bp, synthetic construct
  misc_feature 1..21: note = Synthetic construct
  source 1..21: mol_type = other DNA
tgccggagtttgctgcgattg

SEQ ID NO: 5734 - DNA, 21 bp, synthetic construct
  misc_feature 1..21: note = Synthetic construct
  source 1..21: mol_type = other DNA
gccggagtttgctgcgattgc

SEQ ID NO: 5735 - DNA, 21 bp, synthetic construct
  misc_feature 1..21: note = Synthetic construct
  source 1..21: mol_type = other DNA
ccggagtttgctgcgattgct

SEQ ID NO: 5736 - DNA, 21 bp, synthetic construct
  misc_feature 1..21: note = Synthetic construct
  source 1..21: mol_type = other DNA
cggagtttgctgcgattgctg

SEQ ID NO: 5737 - DNA, 21 bp, synthetic construct
  misc_feature 1..21: note = Synthetic construct
  source 1..21: mol_type = other DNA
ggagtttgctgcgattgctga

SEQ ID NO: 5738 - DNA, 21 bp, synthetic construct
  misc_feature 1..21: note = Synthetic construct
  source 1..21: mol_type = other DNA
gagtttgctgcgattgctgag

SEQ ID NO: 5739 - DNA, 21 bp, synthetic construct
  misc_feature 1..21: note = Synthetic construct
  source 1..21: mol_type = other DNA
agtttgctgcgattgctgagg

SEQ ID NO: 5740 - DNA, 21 bp, synthetic construct
  misc_feature 1..21: note = Synthetic construct
  source 1..21: mol_type = other DNA
gtttgctgcgattgctgaggg

SEQ ID NO: 5741 - DNA, 21 bp, synthetic construct
  misc_feature 1..21: note = Synthetic construct
  source 1..21: mol_type = other DNA
tttgctgcgattgctgaggga

SEQ ID NO: 5742 - DNA, 21 bp, synthetic construct
  misc_feature 1..21: note = Synthetic construct
  source 1..21: mol_type = other DNA
ttgctgcgattgctgagggaa

SEQ ID NO: 5743 - DNA, 21 bp, synthetic construct
  misc_feature 1..21: note = Synthetic construct
  source 1..21: mol_type = other DNA
tgctgcgattgctgagggaat

SEQ ID NO: 5744 - DNA, 21 bp, synthetic construct
  misc_feature 1..21: note = Synthetic construct
  source 1..21: mol_type = other DNA
gctgcgattgctgagggaatc

SEQ ID NO: 5745 - DNA, 21 bp, synthetic construct
  misc_feature 1..21: note = Synthetic construct
  source 1..21: mol_type = other DNA
ctgcgattgctgagggaatcg

SEQ ID NO: 5746 - DNA, 21 bp, synthetic construct
  misc_feature 1..21: note = Synthetic construct
  source 1..21: mol_type = other DNA
tgcgattgctgagggaatcgg

SEQ ID NO: 5747 - DNA, 21 bp, synthetic construct
  misc_feature 1..21: note = Synthetic construct
  source 1..21: mol_type = other DNA
gcgattgctgagggaatcggg

SEQ ID NO: 5748 - DNA, 21 bp, synthetic construct
  misc_feature 1..21: note = Synthetic construct
  source 1..21: mol_type = other DNA
cgattgctgagggaatcgggt

SEQ ID NO: 5749 - DNA, 21 bp, synthetic construct
  misc_feature 1..21: note = Synthetic construct
  source 1..21: mol_type = other DNA
gattgctgagggaatcgggtt

SEQ ID NO: 5750 - DNA, 21 bp, synthetic construct
  misc_feature 1..21: note = Synthetic construct
  source 1..21: mol_type = other DNA
attgctgagggaatcgggttt

SEQ ID NO: 5751 - DNA, 21 bp, synthetic construct
  misc_feature 1..21: note = Synthetic construct
  source 1..21: mol_type = other DNA
ttgctgagggaatcgggtttc

SEQ ID NO: 5752 - DNA, 21 bp, synthetic construct
  misc_feature 1..21: note = Synthetic construct
  source 1..21: mol_type = other DNA
tgctgagggaatcgggtttcc

SEQ ID NO: 5753 - DNA, 21 bp, synthetic construct
  misc_feature 1..21: note = Synthetic construct
  source 1..21: mol_type = other DNA
gctgagggaatcgggtttcca

SEQ ID NO: 5754 - DNA, 21 bp, synthetic construct
  misc_feature 1..21: note = Synthetic construct
  source 1..21: mol_type = other DNA
ctgagggaatcgggtttccat

SEQ ID NO: 5755 - DNA, 21 bp, synthetic construct
  misc_feature 1..21: note = Synthetic construct
  source 1..21: mol_type = other DNA
tgagggaatcgggtttccatc

SEQ ID NO: 5756 - DNA, 21 bp, synthetic construct
  misc_feature 1..21: note = Synthetic construct
  source 1..21: mol_type = other DNA
gagggaatcgggtttccatct

SEQ ID NO: 5757 - DNA, 21 bp, synthetic construct
  misc_feature 1..21: note = Synthetic construct
  source 1..21: mol_type = other DNA
agggaatcgggtttccatctt

SEQ ID NO: 5758 - DNA, 21 bp, synthetic construct
  misc_feature 1..21: note = Synthetic construct
  source 1..21: mol_type = other DNA
gggaatcgggtttccatcttt

SEQ ID NO: 5759 - DNA, 21 bp, synthetic construct
  misc_feature 1..21: note = Synthetic construct
  source 1..21: mol_type = other DNA
ggaatcgggtttccatctttt

SEQ ID NO: 5760 - DNA, 21 bp, synthetic construct
  misc_feature 1..21: note = Synthetic construct
  source 1..21: mol_type = other DNA
gaatcgggtttccatctttta

SEQ ID NO: 5761 - DNA, 21 bp, synthetic construct
  misc_feature 1..21: note = Synthetic construct
  source 1..21: mol_type = other DNA
aatcgggtttccatcttttag

SEQ ID NO: 5762 - DNA, 21 bp, synthetic construct
  misc_feature 1..21: note = Synthetic construct
  source 1..21: mol_type = other DNA
atcgggtttccatcttttagg

SEQ ID NO: 5763 - DNA, 21 bp, synthetic construct
  misc_feature 1..21: note = Synthetic construct
  source 1..21: mol_type = other DNA
tcgggtttccatcttttagga

SEQ ID NO: 5764 - DNA, 21 bp, synthetic construct
  misc_feature 1..21: note = Synthetic construct
  source 1..21: mol_type = other DNA
cgggtttccatcttttaggag

SEQ ID NO: 5765 - DNA, 21 bp, synthetic construct
  misc_feature 1..21: note = Synthetic construct
  source 1..21: mol_type = other DNA
gggtttccatcttttaggaga

SEQ ID NO: 5766 - DNA, 21 bp, synthetic construct
  misc_feature 1..21: note = Synthetic construct
  source 1..21: mol_type = other DNA
ggtttccatcttttaggagac

SEQ ID NO: 5767 - DNA, 21 bp, synthetic construct
  misc_feature 1..21: note = Synthetic construct
  source 1..21: mol_type = other DNA
gtttccatcttttaggagacc

SEQ ID NO: 5768 - DNA, 21 bp, synthetic construct
  misc_feature 1..21: note = Synthetic construct
  source 1..21: mol_type = other DNA
tttccatcttttaggagacct

SEQ ID NO: 5769 - DNA, 21 bp, synthetic construct
  misc_feature 1..21: note = Synthetic construct
  source 1..21: mol_type = other DNA
ttccatcttttaggagacctt

SEQ ID NO: 5770 - DNA, 21 bp, synthetic construct
  misc_feature 1..21: note = Synthetic construct
  source 1..21: mol_type = other DNA
tccatcttttaggagaccttg

SEQ ID NO: 5771 - DNA, 21 bp, synthetic construct
  misc_feature 1..21: note = Synthetic construct
  source 1..21: mol_type = other DNA
ccatcttttaggagaccttgc

SEQ ID NO: 5772 - DNA, 21 bp, synthetic construct
  misc_feature 1..21: note = Synthetic construct
  source 1..21: mol_type = other DNA
catcttttaggagaccttgca

SEQ ID NO: 5773 - DNA, 21 bp, synthetic construct
  misc_feature 1..21: note = Synthetic construct
  source 1..21: mol_type = other DNA
atcttttaggagaccttgcat

SEQ ID NO: 5774 - DNA, 21 bp, synthetic construct
  misc_feature 1..21: note = Synthetic construct
  source 1..21: mol_type = other DNA
tcttttaggagaccttgcatt

SEQ ID NO: 5775 - DNA, 21 bp, synthetic construct
  misc_feature 1..21: note = Synthetic construct
  source 1..21: mol_type = other DNA
cttttaggagaccttgcattg

SEQ ID NO: 5776 - DNA, 21 bp, synthetic construct
  misc_feature 1..21: note = Synthetic construct
  source 1..21: mol_type = other DNA
ttttaggagaccttgcattgc

SEQ ID NO: 5777 - DNA, 21 bp, synthetic construct
  misc_feature 1..21: note = Synthetic construct
  source 1..21: mol_type = other DNA
tttaggagaccttgcattgcc

SEQ ID NO: 5778 - DNA, 21 bp, synthetic construct
  misc_feature 1..21: note = Synthetic construct
  source 1..21: mol_type = other DNA
ttaggagaccttgcattgcct

SEQ ID NO: 5779 - DNA, 21 bp, synthetic construct
  misc_feature 1..21: note = Synthetic construct
  source 1..21: mol_type = other DNA
taggagaccttgcattgcctt

SEQ ID NO: 5780 - DNA, 21 bp, synthetic construct
  misc_feature 1..21: note = Synthetic construct
  source 1..21: mol_type = other DNA
aggagaccttgcattgcctta

SEQ ID NO: 5781 - DNA, 21 bp, synthetic construct
  misc_feature 1..21: note = Synthetic construct
  source 1..21: mol_type = other DNA
ggagaccttgcattgccttaa

SEQ ID NO: 5782 - DNA, 21 bp, synthetic construct
  misc_feature 1..21: note = Synthetic construct
  source 1..21: mol_type = other DNA
gagaccttgcattgccttaac

SEQ ID NO: 5783 - DNA, 21 bp, synthetic construct
  misc_feature 1..21: note = Synthetic construct
  source 1..21: mol_type = other DNA
agaccttgcattgccttaaca

SEQ ID NO: 5784 - DNA, 21 bp, synthetic construct
  misc_feature 1..21: note = Synthetic construct
  source 1..21: mol_type = other DNA
gaccttgcattgccttaacaa

SEQ ID NO: 5785 - DNA, 21 bp, synthetic construct
  misc_feature 1..21: note = Synthetic construct
  source 1..21: mol_type = other DNA
accttgcattgccttaacaat

SEQ ID NO: 5786 - DNA, 21 bp, synthetic construct
  misc_feature 1..21: note = Synthetic construct
  source 1..21: mol_type = other DNA
ccttgcattgccttaacaata

SEQ ID NO: 5787 - DNA, 21 bp, synthetic construct
  misc_feature 1..21: note = Synthetic construct
  source 1..21: mol_type = other DNA
cttgcattgccttaacaataa

SEQ ID NO: 5788 - DNA, 21 bp, synthetic construct
  misc_feature 1..21: note = Synthetic construct
  source 1..21: mol_type = other DNA
ttgcattgccttaacaataag

SEQ ID NO: 5789 - DNA, 21 bp, synthetic construct
  misc_feature 1..21: note = Synthetic construct
  source 1..21: mol_type = other DNA
tgcattgccttaacaataagc

SEQ ID NO: 5790 - DNA, 21 bp, synthetic construct
  misc_feature 1..21: note = Synthetic construct
  source 1..21: mol_type = other DNA
gcattgccttaacaataagct

SEQ ID NO: 5791 - DNA, 21 bp, synthetic construct
  misc_feature 1..21: note = Synthetic construct
  source 1..21: mol_type = other DNA
cattgccttaacaataagctc

SEQ ID NO: 5792 - DNA, 21 bp, synthetic construct
  misc_feature 1..21: note = Synthetic construct
  source 1..21: mol_type = other DNA
attgccttaacaataagctcg

SEQ ID NO: 5793 - DNA, 21 bp, synthetic construct
  misc_feature 1..21: note = Synthetic construct
  source 1..21: mol_type = other DNA
ttgccttaacaataagctcgc

SEQ ID NO: 5794 - DNA, 21 bp, synthetic construct
  misc_feature 1..21: note = Synthetic construct
  source 1..21: mol_type = other DNA
tgccttaacaataagctcgca

SEQ ID NO: 5795 - DNA, 21 bp, synthetic construct
  misc_feature 1..21: note = Synthetic construct
  source 1..21: mol_type = other DNA
gccttaacaataagctcgcag

SEQ ID NO: 5796 - DNA, 21 bp, synthetic construct
  misc_feature 1..21: note = Synthetic construct
  source 1..21: mol_type = other DNA
ccttaacaataagctcgcagt

SEQ ID NO: 5797 - DNA, 21 bp, synthetic construct
  misc_feature 1..21: note = Synthetic construct
  source 1..21: mol_type = other DNA
cttaacaataagctcgcagtc

SEQ ID NO: 5798 - DNA, 21 bp, synthetic construct
  misc_feature 1..21: note = Synthetic construct
  source 1..21: mol_type = other DNA
ttaacaataagctcgcagtcg

SEQ ID NO: 5799 - DNA, 21 bp, synthetic construct
  misc_feature 1..21: note = Synthetic construct
  source 1..21: mol_type = other DNA
taacaataagctcgcagtcgg

SEQ ID NO: 5800 - DNA, 21 bp, synthetic construct
  misc_feature 1..21: note = Synthetic construct
  source 1..21: mol_type = other DNA
aacaataagctcgcagtcgga

SEQ ID NO: 5801 - DNA, 21 bp, synthetic construct
  misc_feature 1..21: note = Synthetic construct
  source 1..21: mol_type = other DNA
acaataagctcgcagtcggaa

SEQ ID NO: 5802 - DNA, 21 bp, synthetic construct
  misc_feature 1..21: note = Synthetic construct
  source 1..21: mol_type = other DNA
caataagctcgcagtcggaat

SEQ ID NO: 5803 - DNA, 21 bp, synthetic construct
  misc_feature 1..21: note = Synthetic construct
  source 1..21: mol_type = other DNA
aataagctcgcagtcggaatt

SEQ ID NO: 5804 - DNA, 21 bp, synthetic construct
  misc_feature 1..21: note = Synthetic construct
  source 1..21: mol_type = other DNA
ataagctcgcagtcggaattc

SEQ ID NO: 5805 - DNA, 21 bp, synthetic construct
  misc_feature 1..21: note = Synthetic construct
  source 1..21: mol_type = other DNA
taagctcgcagtcggaattcg

SEQ ID NO: 5806 - DNA, 21 bp, synthetic construct
  misc_feature 1..21: note = Synthetic construct
  source 1..21: mol_type = other DNA
aagctcgcagtcggaattcgt

SEQ ID NO: 5807 - DNA, 21 bp, synthetic construct
  misc_feature 1..21: note = Synthetic construct
  source 1..21: mol_type = other DNA
agctcgcagtcggaattcgta

SEQ ID NO: 5808 - DNA, 21 bp, synthetic construct
  misc_feature 1..21: note = Synthetic construct
  source 1..21: mol_type = other DNA
gctcgcagtcggaattcgtag

SEQ ID NO: 5809 - DNA, 21 bp, synthetic construct
  misc_feature 1..21: note = Synthetic construct
  source 1..21: mol_type = other DNA
ctcgcagtcggaattcgtagc

SEQ ID NO: 5810 - DNA, 21 bp, synthetic construct
  misc_feature 1..21: note = Synthetic construct
  source 1..21: mol_type = other DNA
tcgcagtcggaattcgtagcg

SEQ ID NO: 5811 - DNA, 21 bp, synthetic construct
  misc_feature 1..21: note = Synthetic construct
  source 1..21: mol_type = other DNA
cgcagtcggaattcgtagcga

SEQ ID NO: 5812 - DNA, 21 bp, synthetic construct
  misc_feature 1..21: note = Synthetic construct
  source 1..21: mol_type = other DNA
gcagtcggaattcgtagcgaa

SEQ ID NO: 5813 - DNA, 21 bp, synthetic construct
  misc_feature 1..21: note = Synthetic construct
  source 1..21: mol_type = other DNA
cagtcggaattcgtagcgaaa

SEQ ID NO: 5814 - DNA, 21 bp, synthetic construct
  misc_feature 1..21: note = Synthetic construct
  source 1..21: mol_type = other DNA
agtcggaattcgtagcgaaaa

SEQ ID NO: 5815 - DNA, 21 bp, synthetic construct
  misc_feature 1..21: note = Synthetic construct
  source 1..21: mol_type = other DNA
gtcggaattcgtagcgaaaat

SEQ ID NO: 5816 - DNA, 21 bp, synthetic construct
  misc_feature 1..21: note = Synthetic construct
  source 1..21: mol_type = other DNA
tcggaattcgtagcgaaaatt

SEQ ID NO: 5817 - DNA, 21 bp, synthetic construct
  misc_feature 1..21: note = Synthetic construct
  source 1..21: mol_type = other DNA
cggaattcgtagcgaaaattg

SEQ ID NO: 5818 - DNA, 21 bp, synthetic construct
  misc_feature 1..21: note = Synthetic construct
  source 1..21: mol_type = other DNA
ggaattcgtagcgaaaattgg

SEQ ID NO: 5819 - DNA, 21 bp, synthetic construct
  misc_feature 1..21: note = Synthetic construct
  source 1..21: mol_type = other DNA
gaattcgtagcgaaaattgga

SEQ ID NO: 5820 - DNA, 21 bp, synthetic construct
  misc_feature 1..21: note = Synthetic construct
  source 1..21: mol_type = other DNA
aattcgtagcgaaaattggaa

SEQ ID NO: 5821 - DNA, 21 bp, synthetic construct
  misc_feature 1..21: note = Synthetic construct
  source 1..21: mol_type = other DNA
attcgtagcgaaaattggaat

SEQ ID NO: 5822 - DNA, 21 bp, synthetic construct
  misc_feature 1..21: note = Synthetic construct
  source 1..21: mol_type = other DNA
ttcgtagcgaaaattggaatg

SEQ ID NO: 5823 - DNA, 21 bp, synthetic construct
  misc_feature 1..21: note = Synthetic construct
  source 1..21: mol_type = other DNA
tcgtagcgaaaattggaatgg

SEQ ID NO: 5824 - DNA, 21 bp, synthetic construct
  misc_feature 1..21: note = Synthetic construct
  source 1..21: mol_type = other DNA
cgtagcgaaaattggaatggt

SEQ ID NO: 5825 - DNA, 21 bp, synthetic construct
  misc_feature 1..21: note = Synthetic construct
  source 1..21: mol_type = other DNA
gtagcgaaaattggaatggtt

SEQ ID NO: 5826 - DNA, 21 bp, synthetic construct
  misc_feature 1..21: note = Synthetic construct
  source 1..21: mol_type = other DNA
tagcgaaaattggaatggtta

SEQ ID NO: 5827 - DNA, 21 bp, synthetic construct
  misc_feature 1..21: note = Synthetic construct
  source 1..21: mol_type = other DNA
agcgaaaattggaatggttag

SEQ ID NO: 5828 - DNA, 21 bp, synthetic construct
  misc_feature 1..21: note = Synthetic construct
  source 1..21: mol_type = other DNA
gcgaaaattggaatggttagt

SEQ ID NO: 5829 - DNA, 21 bp, synthetic construct
  misc_feature 1..21: note = Synthetic construct
  source 1..21: mol_type = other DNA
cgaaaattggaatggttagtt

SEQ ID NO: 5830 - DNA, 21 bp, synthetic construct
  misc_feature 1..21: note = Synthetic construct
  source 1..21: mol_type = other DNA
gaaaattggaatggttagttc

SEQ ID NO: 5831 - DNA, 21 bp, synthetic construct
  misc_feature 1..21: note = Synthetic construct
  source 1..21: mol_type = other DNA
aaaattggaatggttagttcc

SEQ ID NO: 5832 - DNA, 21 bp, synthetic construct
  misc_feature 1..21: note = Synthetic construct
  source 1..21: mol_type = other DNA
aaattggaatggttagttcca

SEQ ID NO: 5833 - DNA, 21 bp, synthetic construct
  misc_feature 1..21: note = Synthetic construct
  source 1..21: mol_type = other DNA
aattggaatggttagttccat

SEQ ID NO: 5834 - DNA, 21 bp, synthetic construct
  misc_feature 1..21: note = Synthetic construct
  source 1..21: mol_type = other DNA
attggaatggttagttccata

SEQ ID NO: 5835 - DNA, 21 bp, synthetic construct
  misc_feature 1..21: note = Synthetic construct
  source 1..21: mol_type = other DNA
ttggaatggttagttccatat

SEQ ID NO: 5836 - DNA, 21 bp, synthetic construct
  misc_feature 1..21: note = Synthetic construct
  source 1..21: mol_type = other DNA
tggaatggttagttccatatt

SEQ ID NO: 5837 - DNA, 21 bp, synthetic construct
  misc_feature 1..21: note = Synthetic construct
  source 1..21: mol_type = other DNA
ggaatggttagttccatattt

SEQ ID NO: 5838 - DNA, 21 bp, synthetic construct
  misc_feature 1..21: note = Synthetic construct
  source 1..21: mol_type = other DNA
gaatggttagttccatattta

SEQ ID NO: 5839 - DNA, 21 bp, synthetic construct
  misc_feature 1..21: note = Synthetic construct
  source 1..21: mol_type = other DNA
aatggttagttccatatttaa

SEQ ID NO: 5840 - DNA, 21 bp, synthetic construct
  misc_feature 1..21: note = Synthetic construct
  source 1..21: mol_type = other DNA
atggttagttccatatttaag

SEQ ID NO: 5841 - DNA, 21 bp, synthetic construct
  misc_feature 1..21: note = Synthetic construct
  source 1..21: mol_type = other DNA
tggttagttccatatttaagt

SEQ ID NO: 5842 - DNA, 21 bp, synthetic construct
  misc_feature 1..21: note = Synthetic construct
  source 1..21: mol_type = other DNA
ggttagttccatatttaagta

SEQ ID NO: 5843 - DNA, 21 bp, synthetic construct
  misc_feature 1..21: note = Synthetic construct
  source 1..21: mol_type = other DNA
gttagttccatatttaagtac

SEQ ID NO: 5844 - DNA, 21 bp, synthetic construct
  misc_feature 1..21: note = Synthetic construct
  source 1..21: mol_type = other DNA
ttagttccatatttaagtacg

SEQ ID NO: 5845 - DNA, 21 bp, synthetic construct
  misc_feature 1..21: note = Synthetic construct
  source 1..21: mol_type = other DNA
tagttccatatttaagtacga

SEQ ID NO: 5846 - DNA, 21 bp, synthetic construct
  misc_feature 1..21: note = Synthetic construct
  source 1..21: mol_type = other DNA
agttccatatttaagtacgaa

SEQ ID NO: 5847 - DNA, 21 bp, synthetic construct
  misc_feature 1..21: note = Synthetic construct
  source 1..21: mol_type = other DNA
gttccatatttaagtacgaac

SEQ ID NO: 5848 - DNA, 21 bp, synthetic construct
  misc_feature 1..21: note = Synthetic construct
  source 1..21: mol_type = other DNA
ttccatatttaagtacgaacg

SEQ ID NO: 5849 - DNA, 21 bp, synthetic construct
  misc_feature 1..21: note = Synthetic construct
  source 1..21: mol_type = other DNA
tccatatttaagtacgaacgc

SEQ ID NO: 5850 - DNA, 21 bp, synthetic construct
  misc_feature 1..21: note = Synthetic construct
  source 1..21: mol_type = other DNA
ccatatttaagtacgaacgcc

SEQ ID NO: 5851 - DNA, 21 bp, synthetic construct
  misc_feature 1..21: note = Synthetic construct
  source 1..21: mol_type = other DNA
catatttaagtacgaacgcca

SEQ ID NO: 5852 - DNA, 21 bp, synthetic construct
  misc_feature 1..21: note = Synthetic construct
  source 1..21: mol_type = other DNA
atatttaagtacgaacgccat

SEQ ID NO: 5853 - DNA, 21 bp, synthetic construct
  misc_feature 1..21: note = Synthetic construct
  source 1..21: mol_type = other DNA
tatttaagtacgaacgccatg

SEQ ID NO: 5854 - DNA, 21 bp, synthetic construct
  misc_feature 1..21: note = Synthetic construct
  source 1..21: mol_type = other DNA
atttaagtacgaacgccatgc

SEQ ID NO: 5855 - DNA, 21 bp, synthetic construct
  misc_feature 1..21: note = Synthetic construct
  source 1..21: mol_type = other DNA
tttaagtacgaacgccatgcg

SEQ ID NO: 5856 - DNA, 21 bp, synthetic construct
  misc_feature 1..21: note = Synthetic construct
  source 1..21: mol_type = other DNA
ttaagtacgaacgccatgcgg

SEQ ID NO: 5857 - DNA, 21 bp, synthetic construct
  misc_feature 1..21: note = Synthetic construct
  source 1..21: mol_type = other DNA
taagtacgaacgccatgcggc

SEQ ID NO: 5858 - DNA, 21 bp, synthetic construct
  misc_feature 1..21: note = Synthetic construct
  source 1..21: mol_type = other DNA
aagtacgaacgccatgcggct

SEQ ID NO: 5859 - DNA, 21 bp, synthetic construct
  misc_feature 1..21: note = Synthetic construct
  source 1..21: mol_type = other DNA
agtacgaacgccatgcggcta

SEQ ID NO: 5860 - DNA, 21 bp, synthetic construct
  misc_feature 1..21: note = Synthetic construct
  source 1..21: mol_type = other DNA
gtacgaacgccatgcggctac

SEQ ID NO: 5861 - DNA, 21 bp, synthetic construct
  misc_feature 1..21: note = Synthetic construct
  source 1..21: mol_type = other DNA
tacgaacgccatgcggctaca

SEQ ID NO: 5862 - DNA, 21 bp, synthetic construct
  misc_feature 1..21: note = Synthetic construct
  source 1..21: mol_type = other DNA
acgaacgccatgcggctacag

SEQ ID NO: 5863 - DNA, 21 bp, synthetic construct
  misc_feature 1..21: note = Synthetic construct
  source 1..21: mol_type = other DNA
cgaacgccatgcggctacagg

SEQ ID NO: 5864 - DNA, 21 bp, synthetic construct
  misc_feature 1..21: note = Synthetic construct
  source 1..21: mol_type = other DNA
gaacgccatgcggctacagga

SEQ ID NO: 5865 - DNA, 21 bp, synthetic construct
  misc_feature 1..21: note = Synthetic construct
  source 1..21: mol_type = other DNA
aacgccatgcggctacaggaa

SEQ ID NO: 5866 - DNA, 21 bp, synthetic construct
  misc_feature 1..21: note = Synthetic construct
  source 1..21: mol_type = other DNA
acgccatgcggctacaggaag

SEQ ID NO: 5867 - DNA, 21 bp, synthetic construct
  misc_feature 1..21: note = Synthetic construct
  source 1..21: mol_type = other DNA
cgccatgcggctacaggaagc

SEQ ID NO: 5868 - DNA, 21 bp, synthetic construct
  misc_feature 1..21: note = Synthetic construct
  source 1..21: mol_type = other DNA
gccatgcggctacaggaagct

SEQ ID NO: 5869 - DNA, 21 bp, synthetic construct
  misc_feature 1..21: note = Synthetic construct
  source 1..21: mol_type = other DNA
ccatgcggctacaggaagctc

SEQ ID NO: 5870 - DNA, 21 bp, synthetic construct
  misc_feature 1..21: note = Synthetic construct
  source 1..21: mol_type = other DNA
catgcggctacaggaagctct

SEQ ID NO: 5871 - DNA, 21 bp, synthetic construct
  misc_feature 1..21: note = Synthetic construct
  source 1..21: mol_type = other DNA
atgcggctacaggaagctcta

SEQ ID NO: 5872 - DNA, 21 bp, synthetic construct
  misc_feature 1..21: note = Synthetic construct
  source 1..21: mol_type = other DNA
tgcggctacaggaagctctac

SEQ ID NO: 5873 - DNA, 21 bp, synthetic construct
  misc_feature 1..21: note = Synthetic construct
  source 1..21: mol_type = other DNA
gcggctacaggaagctctaca

SEQ ID NO: 5874 - DNA, 21 bp, synthetic construct
  misc_feature 1..21: note = Synthetic construct
  source 1..21: mol_type = other DNA
cggctacaggaagctctacac

SEQ ID NO: 5875 - DNA, 21 bp, synthetic construct
  misc_feature 1..21: note = Synthetic construct
  source 1..21: mol_type = other DNA
ggctacaggaagctctacacc

SEQ ID NO: 5876 - DNA, 21 bp, synthetic construct
  misc_feature 1..21: note = Synthetic construct
  source 1..21: mol_type = other DNA
gctacaggaagctctacacca

SEQ ID NO: 5877 - DNA, 21 bp, synthetic construct
  misc_feature 1..21: note = Synthetic construct
  source 1..21: mol_type = other DNA
ctacaggaagctctacaccac

SEQ ID NO: 5878 - DNA, 21 bp, synthetic construct
  misc_feature 1..21: note = Synthetic construct
  source 1..21: mol_type = other DNA
tacaggaagctctacaccacc

SEQ ID NO: 5879 - DNA, 21 bp, synthetic construct
  misc_feature 1..21: note = Synthetic construct
  source 1..21: mol_type = other DNA
acaggaagctctacaccacca

SEQ ID NO: 5880 - DNA, 21 bp, synthetic construct
  misc_feature 1..21: note = Synthetic construct
  source 1..21: mol_type = other DNA
caggaagctctacaccaccaa

SEQ ID NO: 5881 - DNA, 21 bp, synthetic construct
  misc_feature 1..21: note = Synthetic construct
  source 1..21: mol_type = other DNA
aggaagctctacaccaccaac

SEQ ID NO: 5882 - DNA, 21 bp, synthetic construct
  misc_feature 1..21: note = Synthetic construct
  source 1..21: mol_type = other DNA
ggaagctctacaccaccaaca

SEQ ID NO: 5883 - DNA, 21 bp, synthetic construct
  misc_feature 1..21: note = Synthetic construct
  source 1..21: mol_type = other DNA
gaagctctacaccaccaacag

SEQ ID NO: 5884 - DNA, 21 bp, synthetic construct
  misc_feature 1..21: note = Synthetic construct
  source 1..21: mol_type = other DNA
aagctctacaccaccaacagt

SEQ ID NO: 5885 - DNA, 21 bp, synthetic construct
  misc_feature 1..21: note = Synthetic construct
  source 1..21: mol_type = other DNA
agctctacaccaccaacagtc

SEQ ID NO: 5886 - DNA, 21 bp, synthetic construct
  misc_feature 1..21: note = Synthetic construct
  source 1..21: mol_type = other DNA
gctctacaccaccaacagtct

SEQ ID NO: 5887 - DNA, 21 bp, synthetic construct
  misc_feature 1..21: note = Synthetic construct
  source 1..21: mol_type = other DNA
ctctacaccaccaacagtctg

SEQ ID NO: 5888 - DNA, 21 bp, synthetic construct
  misc_feature 1..21: note = Synthetic construct
  source 1..21: mol_type = other DNA
tctacaccaccaacagtctgg

SEQ ID NO: 5889 - DNA, 21 bp, synthetic construct
  misc_feature 1..21: note = Synthetic construct
  source 1..21: mol_type = other DNA
ctacaccaccaacagtctggg

SEQ ID NO: 5890 - DNA, 21 bp, synthetic construct
  misc_feature 1..21: note = Synthetic construct
  source 1..21: mol_type = other DNA
tacaccaccaacagtctgggt

SEQ ID NO: 5891 - DNA, 21 bp, synthetic construct
  misc_feature 1..21: note = Synthetic construct
  source 1..21: mol_type = other DNA
acaccaccaacagtctgggtt

SEQ ID NO: 5892 - DNA, 21 bp, synthetic construct
  misc_feature 1..21: note = Synthetic construct
  source 1..21: mol_type = other DNA
caccaccaacagtctgggttg

SEQ ID NO: 5893 - DNA, 21 bp, synthetic construct
  misc_feature 1..21: note = Synthetic construct
  source 1..21: mol_type = other DNA
accaccaacagtctgggttgc

SEQ ID NO: 5894 - DNA, 21 bp, synthetic construct
  misc_feature 1..21: note = Synthetic construct
  source 1..21: mol_type = other DNA
ccaccaacagtctgggttgcc

SEQ ID NO: 5895 - DNA, 21 bp, synthetic construct
  misc_feature 1..21: note = Synthetic construct
  source 1..21: mol_type = other DNA
caccaacagtctgggttgcca

SEQ ID NO: 5896 - DNA, 21 bp, synthetic construct
  misc_feature 1..21: note = Synthetic construct
  source 1..21: mol_type = other DNA
accaacagtctgggttgccac

SEQ ID NO: 5897 - DNA, 21 bp, synthetic construct
  misc_feature 1..21: note = Synthetic construct
  source 1..21: mol_type = other DNA
ccaacagtctgggttgccact

SEQ ID NO: 5898 - DNA, 21 bp, synthetic construct
  misc_feature 1..21: note = Synthetic construct
  source 1..21: mol_type = other DNA
caacagtctgggttgccactt

SEQ ID NO: 5899 - DNA, 21 bp, synthetic construct
  misc_feature 1..21: note = Synthetic construct
  source 1..21: mol_type = other DNA
aacagtctgggttgccacttt

SEQ ID NO: 5900 - DNA, 21 bp, synthetic construct
  misc_feature 1..21: note = Synthetic construct
  source 1..21: mol_type = other DNA
acagtctgggttgccacttta

SEQ ID NO: 5901 - DNA, 21 bp, synthetic construct
  misc_feature 1..21: note = Synthetic construct
  source 1..21: mol_type = other DNA
cagtctgggttgccactttag

SEQ ID NO: 5902 - DNA, 21 bp, synthetic construct
  misc_feature 1..21: note = Synthetic construct
  source 1..21: mol_type = other DNA
agtctgggttgccactttagg

SEQ ID NO: 5903 - DNA, 21 bp, synthetic construct
  misc_feature 1..21: note = Synthetic construct
  source 1..21: mol_type = other DNA
gtctgggttgccactttaggc

SEQ ID NO: 5904 - DNA, 21 bp, synthetic construct
  misc_feature 1..21: note = Synthetic construct
  source 1..21: mol_type = other DNA
tctgggttgccactttaggca

SEQ ID NO: 5905 - DNA, 21 bp, synthetic construct
  misc_feature 1..21: note = Synthetic construct
  source 1..21: mol_type = other DNA
ctgggttgccactttaggcac

SEQ ID NO: 5906 - DNA, 21 bp, synthetic construct
  misc_feature 1..21: note = Synthetic construct
  source 1..21: mol_type = other DNA
tgggttgccactttaggcacc

SEQ ID NO: 5907 - DNA, 21 bp, synthetic construct
  misc_feature 1..21: note = Synthetic construct
  source 1..21: mol_type = other DNA
gggttgccactttaggcacct

SEQ ID NO: 5908 - DNA, 21 bp, synthetic construct
  misc_feature 1..21: note = Synthetic construct
  source 1..21: mol_type = other DNA
ggttgccactttaggcacctc

SEQ ID NO: 5909 - DNA, 21 bp, synthetic construct
  misc_feature 1..21: note = Synthetic construct
  source 1..21: mol_type = other DNA
gttgccactttaggcacctcg

SEQ ID NO: 5910 - DNA, 21 bp, synthetic construct
  misc_feature 1..21: note = Synthetic construct
  source 1..21: mol_type = other DNA
ttgccactttaggcacctcga

SEQ ID NO: 5911 - DNA, 21 bp, synthetic construct
  misc_feature 1..21: note = Synthetic construct
  source 1..21: mol_type = other DNA
tgccactttaggcacctcgac

SEQ ID NO: 5912 - DNA, 21 bp, synthetic construct
  misc_feature 1..21: note = Synthetic construct
  source 1..21: mol_type = other DNA
gccactttaggcacctcgact

SEQ ID NO: 5913 - DNA, 21 bp, synthetic construct
  misc_feature 1..21: note = Synthetic construct
  source 1..21: mol_type = other DNA
ccactttaggcacctcgactt

SEQ ID NO: 5914 - DNA, 21 bp, synthetic construct
  misc_feature 1..21: note = Synthetic construct
  source 1..21: mol_type = other DNA
cactttaggcacctcgacttt

SEQ ID NO: 5915 - DNA, 21 bp, synthetic construct
  misc_feature 1..21: note = Synthetic construct
  source 1..21: mol_type = other DNA
actttaggcacctcgactttg

SEQ ID NO: 5916 - DNA, 21 bp, synthetic construct
  misc_feature 1..21: note = Synthetic construct
  source 1..21: mol_type = other DNA
ctttaggcacctcgactttga

SEQ ID NO: 5917 - DNA, 21 bp, synthetic construct
  misc_feature 1..21: note = Synthetic construct
  source 1..21: mol_type = other DNA
tttaggcacctcgactttgat

SEQ ID NO: 5918 - DNA, 21 bp, synthetic construct
  misc_feature 1..21: note = Synthetic construct
  source 1..21: mol_type = other DNA
ttaggcacctcgactttgatg

SEQ ID NO: 5919 - DNA, 21 bp, synthetic construct
  misc_feature 1..21: note = Synthetic construct
  source 1..21: mol_type = other DNA
taggcacctcgactttgatgg

SEQ ID NO: 5920 - DNA, 21 bp, synthetic construct
  misc_feature 1..21: note = Synthetic construct
  source 1..21: mol_type = other DNA
aggcacctcgactttgatggt

SEQ ID NO: 5921 - DNA, 21 bp, synthetic construct
  misc_feature 1..21: note = Synthetic construct
  source 1..21: mol_type = other DNA
ggcacctcgactttgatggtg

SEQ ID NO: 5922 - DNA, 21 bp, synthetic construct
  misc_feature 1..21: note = Synthetic construct
  source 1..21: mol_type = other DNA
gcacctcgactttgatggtgt

SEQ ID NO: 5923 - DNA, 21 bp, synthetic construct
  misc_feature 1..21: note = Synthetic construct
  source 1..21: mol_type = other DNA
cacctcgactttgatggtgta

SEQ ID NO: 5924 - DNA, 21 bp, synthetic construct
  misc_feature 1..21: note = Synthetic construct
  source 1..21: mol_type = other DNA
acctcgactttgatggtgtat

SEQ ID NO: 5925 - DNA, 21 bp, synthetic construct
  misc_feature 1..21: note = Synthetic construct
  source 1..21: mol_type = other DNA
cctcgactttgatggtgtatt

SEQ ID NO: 5926 - DNA, 21 bp, synthetic construct
  misc_feature 1..21: note = Synthetic construct
  source 1..21: mol_type = other DNA
ctcgactttgatggtgtattt

SEQ ID NO: 5927 - DNA, 21 bp, synthetic construct
  misc_feature 1..21: note = Synthetic construct
  source 1..21: mol_type = other DNA
tcgactttgatggtgtatttg

SEQ ID NO: 5928 - DNA, 21 bp, synthetic construct
  misc_feature 1..21: note = Synthetic construct
  source 1..21: mol_type = other DNA
cgactttgatggtgtatttgc

SEQ ID NO: 5929 - DNA, 21 bp, synthetic construct
  misc_feature 1..21: note = Synthetic construct
  source 1..21: mol_type = other DNA
gactttgatggtgtatttgcg

SEQ ID NO: 5930 - DNA, 21 bp, synthetic construct
  misc_feature 1..21: note = Synthetic construct
  source 1..21: mol_type = other DNA
actttgatggtgtatttgcga

SEQ ID NO: 5931 - DNA, 21 bp, synthetic construct
  misc_feature 1..21: note = Synthetic construct
  source 1..21: mol_type = other DNA
ctttgatggtgtatttgcgat

SEQ ID NO: 5932 - DNA, 21 bp, synthetic construct
  misc_feature 1..21: note = Synthetic construct
  source 1..21: mol_type = other DNA
tttgatggtgtatttgcgatt

SEQ ID NO: 5933 - DNA, 21 bp, synthetic construct
  misc_feature 1..21: note = Synthetic construct
  source 1..21: mol_type = other DNA
ttgatggtgtatttgcgattc

SEQ ID NO: 5934 - DNA, 21 bp, synthetic construct
  misc_feature 1..21: note = Synthetic construct
  source 1..21: mol_type = other DNA
tgatggtgtatttgcgattct

SEQ ID NO: 5935 - DNA, 21 bp, synthetic construct
  misc_feature 1..21: note = Synthetic construct
  source 1..21: mol_type = other DNA
gatggtgtatttgcgattctg

SEQ ID NO: 5936 - DNA, 21 bp, synthetic construct
  misc_feature 1..21: note = Synthetic construct
  source 1..21: mol_type = other DNA
atggtgtatttgcgattctgc

SEQ ID NO: 5937 - DNA, 21 bp, synthetic construct
  misc_feature 1..21: note = Synthetic construct
  source 1..21: mol_type = other DNA
tggtgtatttgcgattctgcg

SEQ ID NO: 5938 - DNA, 21 bp, synthetic construct
  misc_feature 1..21: note = Synthetic construct
  source 1..21: mol_type = other DNA
ggtgtatttgcgattctgcgc

SEQ ID NO: 5939 - DNA, 21 bp, synthetic construct
  misc_feature 1..21: note = Synthetic construct
  source 1..21: mol_type = other DNA
gtgtatttgcgattctgcgca

SEQ ID NO: 5940 - DNA, 21 bp, synthetic construct
  misc_feature 1..21: note = Synthetic construct
  source 1..21: mol_type = other DNA
tgtatttgcgattctgcgcag

SEQ ID NO: 5941 - DNA, 21 bp, synthetic construct
  misc_feature 1..21: note = Synthetic construct
  source 1..21: mol_type = other DNA
gtatttgcgattctgcgcaga

SEQ ID NO: 5942 - DNA, 21 bp, synthetic construct
  misc_feature 1..21: note = Synthetic construct
  source 1..21: mol_type = other DNA
tatttgcgattctgcgcagag

SEQ ID NO: 5943 - DNA, 21 bp, synthetic construct
  misc_feature 1..21: note = Synthetic construct
  source 1..21: mol_type = other DNA
atttgcgattctgcgcagagc

SEQ ID NO: 5944 - DNA, 21 bp, synthetic construct
  misc_feature 1..21: note = Synthetic construct
  source 1..21: mol_type = other DNA
tttgcgattctgcgcagagct

SEQ ID NO: 5945 - DNA, 21 bp, synthetic construct
  misc_feature 1..21: note = Synthetic construct
  source 1..21: mol_type = other DNA
ttgcgattctgcgcagagctc

SEQ ID NO: 5946 - DNA, 21 bp, synthetic construct
  misc_feature 1..21: note = Synthetic construct
  source 1..21: mol_type = other DNA
tgcgattctgcgcagagctct

SEQ ID NO: 5947 - DNA, 21 bp, synthetic construct
  misc_feature 1..21: note = Synthetic construct
  source 1..21: mol_type = other DNA
gcgattctgcgcagagctctg

SEQ ID NO: 5948 - DNA, 21 bp, synthetic construct
  misc_feature 1..21: note = Synthetic construct
  source 1..21: mol_type = other DNA
cgattctgcgcagagctctga

SEQ ID NO: 5949 - DNA, 21 bp, synthetic construct
  misc_feature 1..21: note = Synthetic construct
  source 1..21: mol_type = other DNA
gattctgcgcagagctctgac

SEQ ID NO: 5950 - DNA, 21 bp, synthetic construct
  misc_feature 1..21: note = Synthetic construct
  source 1..21: mol_type = other DNA
attctgcgcagagctctgacg

SEQ ID NO: 5951 - DNA, 21 bp, synthetic construct
  misc_feature 1..21: note = Synthetic construct
  source 1..21: mol_type = other DNA
ttctgcgcagagctctgacga

SEQ ID NO: 5952 - DNA, 21 bp, synthetic construct
  misc_feature 1..21: note = Synthetic construct
  source 1..21: mol_type = other DNA
tctgcgcagagctctgacgaa

SEQ ID NO: 5953 - DNA, 21 bp, synthetic construct
  misc_feature 1..21: note = Synthetic construct
  source 1..21: mol_type = other DNA
ctgcgcagagctctgacgaac

SEQ ID NO: 5954 - DNA, 21 bp, synthetic construct
  misc_feature 1..21: note = Synthetic construct
  source 1..21: mol_type = other DNA
tgcgcagagctctgacgaacg

SEQ ID NO: 5955 - DNA, 21 bp, synthetic construct
  misc_feature 1..21: note = Synthetic construct
  source 1..21: mol_type = other DNA
gcgcagagctctgacgaacgc

SEQ ID NO: 5956 - DNA, 21 bp, synthetic construct
  misc_feature 1..21: note = Synthetic construct
  source 1..21: mol_type = other DNA
cgcagagctctgacgaacgct

SEQ ID NO: 5957 - DNA, 21 bp, synthetic construct
  misc_feature 1..21: note = Synthetic construct
  source 1..21: mol_type = other DNA
gcagagctctgacgaacgcta

SEQ ID NO: 5958 - DNA, 21 bp, synthetic construct
  misc_feature 1..21: note = Synthetic construct
  source 1..21: mol_type = other DNA
cagagctctgacgaacgctac

SEQ ID NO: 5959 - DNA, 21 bp, synthetic construct
  misc_feature 1..21: note = Synthetic construct
  source 1..21: mol_type = other DNA
agagctctgacgaacgctaca

SEQ ID NO: 5960 - DNA, 21 bp, synthetic construct
  misc_feature 1..21: note = Synthetic construct
  source 1..21: mol_type = other DNA
gagctctgacgaacgctacag

SEQ ID NO: 5961 - DNA, 21 bp, synthetic construct
  misc_feature 1..21: note = Synthetic construct
  source 1..21: mol_type = other DNA
agctctgacgaacgctacagg

SEQ ID NO: 5962 - DNA, 21 bp, synthetic construct
  misc_feature 1..21: note = Synthetic construct
  source 1..21: mol_type = other DNA
gctctgacgaacgctacaggt

SEQ ID NO: 5963 - DNA, 21 bp, synthetic construct
  misc_feature 1..21: note = Synthetic construct
  source 1..21: mol_type = other DNA
ctctgacgaacgctacaggtt

SEQ ID NO: 5964 - DNA, 21 bp, synthetic construct
  misc_feature 1..21: note = Synthetic construct
  source 1..21: mol_type = other DNA
tctgacgaacgctacaggtta

SEQ ID NO: 5965 - DNA, 21 bp, synthetic construct
  misc_feature 1..21: note = Synthetic construct
  source 1..21: mol_type = other DNA
ctgacgaacgctacaggttac

SEQ ID NO: 5966 - DNA, 21 bp, synthetic construct
  misc_feature 1..21: note = Synthetic construct
  source 1..21: mol_type = other DNA
tgacgaacgctacaggttact

SEQ ID NO: 5967 - DNA, 21 bp, synthetic construct
  misc_feature 1..21: note = Synthetic construct
  source 1..21: mol_type = other DNA
gacgaacgctacaggttactt

SEQ ID NO: 5968 - DNA, 21 bp, synthetic construct
  misc_feature 1..21: note = Synthetic construct
  source 1..21: mol_type = other DNA
acgaacgctacaggttacttt

SEQ ID NO: 5969 - DNA, 21 bp, synthetic construct
  misc_feature 1..21: note = Synthetic construct
  source 1..21: mol_type = other DNA
cgaacgctacaggttactttg

SEQ ID NO: 5970 - DNA, 21 bp, synthetic construct
  misc_feature 1..21: note = Synthetic construct
  source 1..21: mol_type = other DNA
gaacgctacaggttactttgt

SEQ ID NO: 5971 - DNA, 21 bp, synthetic construct
  misc_feature 1..21: note = Synthetic construct
  source 1..21: mol_type = other DNA
aacgctacaggttactttgta

SEQ ID NO: 5972 - DNA, 21 bp, synthetic construct
  misc_feature 1..21: note = Synthetic construct
  source 1..21: mol_type = other DNA
acgctacaggttactttgtaa

SEQ ID NO: 5973 - DNA, 21 bp, synthetic construct
  misc_feature 1..21: note = Synthetic construct
  source 1..21: mol_type = other DNA
cgctacaggttactttgtaag

SEQ ID NO: 5974 - DNA, 21 bp, synthetic construct
  misc_feature 1..21: note = Synthetic construct
  source 1..21: mol_type = other DNA
gctacaggttactttgtaagc

SEQ ID NO: 5975 - DNA, 21 bp, synthetic construct
  misc_feature 1..21: note = Synthetic construct
  source 1..21: mol_type = other DNA
ctacaggttactttgtaagcc

SEQ ID NO: 5976 - DNA, 21 bp, synthetic construct
  misc_feature 1..21: note = Synthetic construct
  source 1..21: mol_type = other DNA
tacaggttactttgtaagcct

SEQ ID NO: 5977 - DNA, 21 bp, synthetic construct
  misc_feature 1..21: note = Synthetic construct
  source 1..21: mol_type = other DNA
acaggttactttgtaagcctg

SEQ ID NO: 5978 - DNA, 21 bp, synthetic construct
  misc_feature 1..21: note = Synthetic construct
  source 1..21: mol_type = other DNA
caggttactttgtaagcctgt

SEQ ID NO: 5979 - DNA, 21 bp, synthetic construct
  misc_feature 1..21: note = Synthetic construct
  source 1..21: mol_type = other DNA
aggttactttgtaagcctgtg

SEQ ID NO: 5980 - DNA, 21 bp, synthetic construct
  misc_feature 1..21: note = Synthetic construct
  source 1..21: mol_type = other DNA
ggttactttgtaagcctgtga

SEQ ID NO: 5981 - DNA, 21 bp, synthetic construct
  misc_feature 1..21: note = Synthetic construct
  source 1..21: mol_type = other DNA
gttactttgtaagcctgtgaa

SEQ ID NO: 5982 - DNA, 21 bp, synthetic construct
  misc_feature 1..21: note = Synthetic construct
  source 1..21: mol_type = other DNA
ttactttgtaagcctgtgaac

SEQ ID NO: 5983 - DNA, 21 bp, synthetic construct
  misc_feature 1..21: note = Synthetic construct
  source 1..21: mol_type = other DNA
tactttgtaagcctgtgaacg

SEQ ID NO: 5984 - DNA, 21 bp, synthetic construct
  misc_feature 1..21: note = Synthetic construct
  source 1..21: mol_type = other DNA
actttgtaagcctgtgaacgc

SEQ ID NO: 5985 - DNA, 21 bp, synthetic construct
  misc_feature 1..21: note = Synthetic construct
  source 1..21: mol_type = other DNA
ctttgtaagcctgtgaacgcg

SEQ ID NO: 5986 - DNA, 21 bp, synthetic construct
  misc_feature 1..21: note = Synthetic construct
  source 1..21: mol_type = other DNA
tttgtaagcctgtgaacgcga

SEQ ID NO: 5987 - DNA, 21 bp, synthetic construct
  misc_feature 1..21: note = Synthetic construct
  source 1..21: mol_type = other DNA
ttgtaagcctgtgaacgcgag

SEQ ID NO: 5988 - DNA, 21 bp, synthetic construct
  misc_feature 1..21: note = Synthetic construct
  source 1..21: mol_type = other DNA
tgtaagcctgtgaacgcgagt

SEQ ID NO: 5989 - DNA, 21 bp, synthetic construct
  misc_feature 1..21: note = Synthetic construct
  source 1..21: mol_type = other DNA
gtaagcctgtgaacgcgagtt

SEQ ID NO: 5990 - DNA, 21 bp, synthetic construct
  misc_feature 1..21: note = Synthetic construct
  source 1..21: mol_type = other DNA
taagcctgtgaacgcgagtta

SEQ ID NO: 5991 - DNA, 21 bp, synthetic construct
  misc_feature 1..21: note = Synthetic construct
  source 1..21: mol_type = other DNA
aagcctgtgaacgcgagttag

SEQ ID NO: 5992 - DNA, 21 bp, synthetic construct
  misc_feature 1..21: note = Synthetic construct
  source 1..21: mol_type = other DNA
agcctgtgaacgcgagttaga

SEQ ID NO: 5993 - DNA, 21 bp, synthetic construct
  misc_feature 1..21: note = Synthetic construct
  source 1..21: mol_type = other DNA
gcctgtgaacgcgagttagag

SEQ ID NO: 5994 - DNA, 21 bp, synthetic construct
  misc_feature 1..21: note = Synthetic construct
  source 1..21: mol_type = other DNA
cctgtgaacgcgagttagagc

SEQ ID NO: 5995 - DNA, 21 bp, synthetic construct
  misc_feature 1..21: note = Synthetic construct
  source 1..21: mol_type = other DNA
ctgtgaacgcgagttagagct

SEQ ID NO: 5996 - DNA, 21 bp, synthetic construct
  misc_feature 1..21: note = Synthetic construct
  source 1..21: mol_type = other DNA
tgtgaacgcgagttagagctg

SEQ ID NO: 5997 - DNA, 21 bp, synthetic construct
  misc_feature 1..21: note = Synthetic construct
  source 1..21: mol_type = other DNA
gtgaacgcgagttagagctga

SEQ ID NO: 5998 - DNA, 21 bp, synthetic construct
  misc_feature 1..21: note = Synthetic construct
  source 1..21: mol_type = other DNA
tgaacgcgagttagagctgat

SEQ ID NO: 5999 - DNA, 21 bp, synthetic construct
  misc_feature 1..21: note = Synthetic construct
  source 1..21: mol_type = other DNA
gaacgcgagttagagctgatc

SEQ ID NO: 6000 - DNA, 21 bp, synthetic construct
  misc_feature 1..21: note = Synthetic construct
  source 1..21: mol_type = other DNA
aacgcgagttagagctgatcc

SEQ ID NO: 6001 - DNA, 21 bp, synthetic construct
  misc_feature 1..21: note = Synthetic construct
  source 1..21: mol_type = other DNA
acgcgagttagagctgatcca

SEQ ID NO: 6002 - DNA, 21 bp, synthetic construct
  misc_feature 1..21: note = Synthetic construct
  source 1..21: mol_type = other DNA
cgcgagttagagctgatccat

SEQ ID NO: 6003 - DNA, 21 bp, synthetic construct
  misc_feature 1..21: note = Synthetic construct
  source 1..21: mol_type = other DNA
gcgagttagagctgatccatt

SEQ ID NO: 6004 - DNA, 21 bp, synthetic construct
  misc_feature 1..21: note = Synthetic construct
  source 1..21: mol_type = other DNA
cgagttagagctgatccattc

SEQ ID NO: 6005 - DNA, 21 bp, synthetic construct
  misc_feature 1..21: note = Synthetic construct
  source 1..21: mol_type = other DNA
gagttagagctgatccattca

SEQ ID NO: 6006 - DNA, 21 bp, synthetic construct
  misc_feature 1..21: note = Synthetic construct
  source 1..21: mol_type = other DNA
agttagagctgatccattcag

SEQ ID NO: 6007 - DNA, 21 bp, synthetic construct
  misc_feature 1..21: note = Synthetic construct
  source 1..21: mol_type = other DNA
gttagagctgatccattcagc

SEQ ID NO: 6008 - DNA, 21 bp, synthetic construct
  misc_feature 1..21: note = Synthetic construct
  source 1..21: mol_type = other DNA
ttagagctgatccattcagcg

SEQ ID NO: 6009 - DNA, 21 bp, synthetic construct
  misc_feature 1..21: note = Synthetic construct
  source 1..21: mol_type = other DNA
tagagctgatccattcagcga

SEQ ID NO: 6010 - DNA, 21 bp, synthetic construct
  misc_feature 1..21: note = Synthetic construct
  source 1..21: mol_type = other DNA
agagctgatccattcagcgac

SEQ ID NO: 6011 - DNA, 21 bp, synthetic construct
  misc_feature 1..21: note = Synthetic construct
  source 1..21: mol_type = other DNA
gagctgatccattcagcgacc

SEQ ID NO: 6012 - DNA, 21 bp, synthetic construct
  misc_feature 1..21: note = Synthetic construct
  source 1..21: mol_type = other DNA
agctgatccattcagcgaccc

SEQ ID NO: 6013 - DNA, 21 bp, synthetic construct
  misc_feature 1..21: note = Synthetic construct
  source 1..21: mol_type = other DNA
gctgatccattcagcgacccc

SEQ ID NO: 6014 - DNA, 21 bp, synthetic construct
  misc_feature 1..21: note = Synthetic construct
  source 1..21: mol_type = other DNA
ctgatccattcagcgaccccg

SEQ ID NO: 6015 - DNA, 21 bp, synthetic construct
  misc_feature 1..21: note = Synthetic construct
  source 1..21: mol_type = other DNA
tgatccattcagcgaccccgt

SEQ ID NO: 6016 - DNA, 21 bp, synthetic construct
  misc_feature 1..21: note = Synthetic construct
  source 1..21: mol_type = other DNA
gatccattcagcgaccccgtt

SEQ ID NO: 6017 - DNA, 21 bp, synthetic construct
  misc_feature 1..21: note = Synthetic construct
  source 1..21: mol_type = other DNA
atccattcagcgaccccgtta

SEQ ID NO: 6018 - DNA, 21 bp, synthetic construct
  misc_feature 1..21: note = Synthetic construct
  source 1..21: mol_type = other DNA
tccattcagcgaccccgttag

SEQ ID NO: 6019 - DNA, 21 bp, synthetic construct
  misc_feature 1..21: note = Synthetic construct
  source 1..21: mol_type = other DNA
ccattcagcgaccccgttagc

SEQ ID NO: 6020 - DNA, 21 bp, synthetic construct
  misc_feature 1..21: note = Synthetic construct
  source 1..21: mol_type = other DNA
cattcagcgaccccgttagcg

SEQ ID NO: 6021 - DNA, 21 bp, synthetic construct
  misc_feature 1..21: note = Synthetic construct
  source 1..21: mol_type = other DNA
attcagcgaccccgttagcga

SEQ ID NO: 6022 - DNA, 21 bp, synthetic construct
  misc_feature 1..21: note = Synthetic construct
  source 1..21: mol_type = other DNA
ttcagcgaccccgttagcgaa

SEQ ID NO: 6023 - DNA, 21 bp, synthetic construct
  misc_feature 1..21: note = Synthetic construct
  source 1..21: mol_type = other DNA
tcagcgaccccgttagcgaag

SEQ ID NO: 6024 - DNA, 21 bp, synthetic construct
  misc_feature 1..21: note = Synthetic construct
  source 1..21: mol_type = other DNA
cagcgaccccgttagcgaagt

SEQ ID NO: 6025 - DNA, 21 bp, synthetic construct
  misc_feature 1..21: note = Synthetic construct
  source 1..21: mol_type = other DNA
agcgaccccgttagcgaagtt

SEQ ID NO: 6026 - DNA, 21 bp, synthetic construct
  misc_feature 1..21: note = Synthetic construct
  source 1..21: mol_type = other DNA
gcgaccccgttagcgaagttg

SEQ ID NO: 6027 - DNA, 21 bp, synthetic construct
  misc_feature 1..21: note = Synthetic construct
  source 1..21: mol_type = other DNA
cgaccccgttagcgaagttgc

SEQ ID NO: 6028 - DNA, 21 bp, synthetic construct
  misc_feature 1..21: note = Synthetic construct
  source 1..21: mol_type = other DNA
gaccccgttagcgaagttgct

SEQ ID NO: 6029 - DNA, 21 bp, synthetic construct
  misc_feature 1..21: note = Synthetic construct
  source 1..21: mol_type = other DNA
accccgttagcgaagttgctt

SEQ ID NO: 6030 - DNA, 21 bp, synthetic construct
  misc_feature 1..21: note = Synthetic construct
  source 1..21: mol_type = other DNA
ccccgttagcgaagttgcttg

SEQ ID NO: 6031 - DNA, 21 bp, synthetic construct
  misc_feature 1..21: note = Synthetic construct
  source 1..21: mol_type = other DNA
cccgttagcgaagttgcttgg

SEQ ID NO: 6032 - DNA, 21 bp, synthetic construct
  misc_feature 1..21: note = Synthetic construct
  source 1..21: mol_type = other DNA
ccgttagcgaagttgcttggg

SEQ ID NO: 6033 - DNA, 21 bp, synthetic construct
  misc_feature 1..21: note = Synthetic construct
  source 1..21: mol_type = other DNA
cgttagcgaagttgcttgggg

SEQ ID NO: 6034 - DNA, 21 bp, synthetic construct
  misc_feature 1..21: note = Synthetic construct
  source 1..21: mol_type = other DNA
gttagcgaagttgcttggggc

SEQ ID NO: 6035 - DNA, 21 bp, synthetic construct
  misc_feature 1..21: note = Synthetic construct
  source 1..21: mol_type = other DNA
ttagcgaagttgcttggggcg

SEQ ID NO: 6036 - DNA, 21 bp, synthetic construct
  misc_feature 1..21: note = Synthetic construct
  source 1..21: mol_type = other DNA
tagcgaagttgcttggggcga

SEQ ID NO: 6037 - DNA, 21 bp, synthetic construct
  misc_feature 1..21: note = Synthetic construct
  source 1..21: mol_type = other DNA
agcgaagttgcttggggcgac

SEQ ID NO: 6038 - DNA, 21 bp, synthetic construct
  misc_feature 1..21: note = Synthetic construct
  source 1..21: mol_type = other DNA
gcgaagttgcttggggcgaca

SEQ ID NO: 6039 - DNA, 21 bp, synthetic construct
  misc_feature 1..21: note = Synthetic construct
  source 1..21: mol_type = other DNA
cgaagttgcttggggcgacag

SEQ ID NO: 6040 - DNA, 21 bp, synthetic construct
  misc_feature 1..21: note = Synthetic construct
  source 1..21: mol_type = other DNA
gaagttgcttggggcgacagt

SEQ ID NO: 6041 - DNA, 21 bp, synthetic construct
  misc_feature 1..21: note = Synthetic construct
  source 1..21: mol_type = other DNA
aagttgcttggggcgacagtc

SEQ ID NO: 6042 - DNA, 21 bp, synthetic construct
  misc_feature 1..21: note = Synthetic construct
  source 1..21: mol_type = other DNA
agttgcttggggcgacagtca

SEQ ID NO: 6043 - DNA, 21 bp, synthetic construct
  misc_feature 1..21: note = Synthetic construct
  source 1..21: mol_type = other DNA
gttgcttggggcgacagtcac

SEQ ID NO: 6044 - DNA, 21 bp, synthetic construct
  misc_feature 1..21: note = Synthetic construct
  source 1..21: mol_type = other DNA
ttgcttggggcgacagtcacg

SEQ ID NO: 6045 - DNA, 21 bp, synthetic construct
  misc_feature 1..21: note = Synthetic construct
  source 1..21: mol_type = other DNA
tgcttggggcgacagtcacgt

SEQ ID NO: 6046 - DNA, 21 bp, synthetic construct
  misc_feature 1..21: note = Synthetic construct
  source 1..21: mol_type = other DNA
gcttggggcgacagtcacgtc

SEQ ID NO: 6047 - DNA, 21 bp, synthetic construct
  misc_feature 1..21: note = Synthetic construct
  source 1..21: mol_type = other DNA
cttggggcgacagtcacgtcg

SEQ ID NO: 6048 - DNA, 21 bp, synthetic construct
  misc_feature 1..21: note = Synthetic construct
  source 1..21: mol_type = other DNA
ttggggcgacagtcacgtcgc

SEQ ID NO: 6049 - DNA, 21 bp, synthetic construct
  misc_feature 1..21: note = Synthetic construct
  source 1..21: mol_type = other DNA
tggggcgacagtcacgtcgcc

SEQ ID NO: 6050 - DNA, 21 bp, synthetic construct
  misc_feature 1..21: note = Synthetic construct
  source 1..21: mol_type = other DNA
ggggcgacagtcacgtcgcca

SEQ ID NO: 6051 - DNA, 21 bp, synthetic construct
  misc_feature 1..21: note = Synthetic construct
  source 1..21: mol_type = other DNA
gggcgacagtcacgtcgccag

SEQ ID NO: 6052 - DNA, 21 bp, synthetic construct
  misc_feature 1..21: note = Synthetic construct
  source 1..21: mol_type = other DNA
ggcgacagtcacgtcgccagt

SEQ ID NO: 6053 - DNA, 21 bp, synthetic construct
  misc_feature 1..21: note = Synthetic construct
  source 1..21: mol_type = other DNA
gcgacagtcacgtcgccagtt

SEQ ID NO: 6054 - DNA, 21 bp, synthetic construct
  misc_feature 1..21: note = Synthetic construct
  source 1..21: mol_type = other DNA
cgacagtcacgtcgccagttc

SEQ ID NO: 6055 - DNA, 21 bp, synthetic construct
  misc_feature 1..21: note = Synthetic construct
  source 1..21: mol_type = other DNA
gacagtcacgtcgccagttcc

SEQ ID NO: 6056 - DNA, 21 bp, synthetic construct
  misc_feature 1..21: note = Synthetic construct
  source 1..21: mol_type = other DNA
acagtcacgtcgccagttccg

SEQ ID NO: 6057 - DNA, 21 bp, synthetic construct
  misc_feature 1..21: note = Synthetic construct
  source 1..21: mol_type = other DNA
cagtcacgtcgccagttccgc

SEQ ID NO: 6058 - DNA, 21 bp, synthetic construct
  misc_feature 1..21: note = Synthetic construct
  source 1..21: mol_type = other DNA
agtcacgtcgccagttccgcc

SEQ ID NO: 6059 - DNA, 21 bp, synthetic construct
  misc_feature 1..21: note = Synthetic construct
  source 1..21: mol_type = other DNA
gtcacgtcgccagttccgcca

SEQ ID NO: 6060 - DNA, 21 bp, synthetic construct
  misc_feature 1..21: note = Synthetic construct
  source 1..21: mol_type = other DNA
tcacgtcgccagttccgccat

SEQ ID NO: 6061 - DNA, 21 bp, synthetic construct
  misc_feature 1..21: note = Synthetic construct
  source 1..21: mol_type = other DNA
cacgtcgccagttccgccatt

SEQ ID NO: 6062 - DNA, 21 bp, synthetic construct
  misc_feature 1..21: note = Synthetic construct
  source 1..21: mol_type = other DNA
acgtcgccagttccgccattg

SEQ ID NO: 6063 - DNA, 21 bp, synthetic construct
  misc_feature 1..21: note = Synthetic construct
  source 1..21: mol_type = other DNA
cgtcgccagttccgccattgt

SEQ ID NO: 6064 - DNA, 21 bp, synthetic construct
  misc_feature 1..21: note = Synthetic construct
  source 1..21: mol_type = other DNA
gtcgccagttccgccattgtc

SEQ ID NO: 6065 - DNA, 21 bp, synthetic construct
  misc_feature 1..21: note = Synthetic construct
  source 1..21: mol_type = other DNA
tcgccagttccgccattgtcg

SEQ ID NO: 6066 - DNA, 21 bp, synthetic construct
  misc_feature 1..21: note = Synthetic construct
  source 1..21: mol_type = other DNA
cgccagttccgccattgtcga

SEQ ID NO: 6067 - DNA, 21 bp, synthetic construct
  misc_feature 1..21: note = Synthetic construct
  source 1..21: mol_type = other DNA
gccagttccgccattgtcgac

SEQ ID NO: 6068 - DNA, 21 bp, synthetic construct
  misc_feature 1..21: note = Synthetic construct
  source 1..21: mol_type = other DNA
ccagttccgccattgtcgacg

SEQ ID NO: 6069 - DNA, 21 bp, synthetic construct
  misc_feature 1..21: note = Synthetic construct
  source 1..21: mol_type = other DNA
cagttccgccattgtcgacga

SEQ ID NO: 6070 - DNA, 21 bp, synthetic construct
  misc_feature 1..21: note = Synthetic construct
  source 1..21: mol_type = other DNA
agttccgccattgtcgacgag

SEQ ID NO: 6071 - DNA, 21 bp, synthetic construct
  misc_feature 1..21: note = Synthetic construct
  source 1..21: mol_type = other DNA
gttccgccattgtcgacgaga

SEQ ID NO: 6072 - DNA, 21 bp, synthetic construct
  misc_feature 1..21: note = Synthetic construct
  source 1..21: mol_type = other DNA
ttccgccattgtcgacgagaa

SEQ ID NO: 6073 - DNA, 21 bp, synthetic construct
  misc_feature 1..21: note = Synthetic construct
  source 1..21: mol_type = other DNA
tccgccattgtcgacgagaac

SEQ ID NO: 6074 - DNA, 21 bp, synthetic construct
  misc_feature 1..21: note = Synthetic construct
  source 1..21: mol_type = other DNA
ccgccattgtcgacgagaacg

SEQ ID NO: 6075 - DNA, 21 bp, synthetic construct
  misc_feature 1..21: note = Synthetic construct
  source 1..21: mol_type = other DNA
cgccattgtcgacgagaacga

SEQ ID NO: 6076 - DNA, 21 bp, synthetic construct
  misc_feature 1..21: note = Synthetic construct
  source 1..21: mol_type = other DNA
gccattgtcgacgagaacgaa

SEQ ID NO: 6077 - DNA, 21 bp, synthetic construct
  misc_feature 1..21: note = Synthetic construct
  source 1..21: mol_type = other DNA
ccattgtcgacgagaacgaac

SEQ ID NO: 6078 - DNA, 21 bp, synthetic construct
  misc_feature 1..21: note = Synthetic construct
  source 1..21: mol_type = other DNA
cattgtcgacgagaacgaact

SEQ ID NO: 6079 - DNA, 21 bp, synthetic construct
  misc_feature 1..21: note = Synthetic construct
  source 1..21: mol_type = other DNA
attgtcgacgagaacgaactg

SEQ ID NO: 6080 - DNA, 21 bp, synthetic construct
  misc_feature 1..21: note = Synthetic construct
  source 1..21: mol_type = other DNA
ttgtcgacgagaacgaactga

SEQ ID NO: 6081 - DNA, 21 bp, synthetic construct
  misc_feature 1..21: note = Synthetic construct
  source 1..21: mol_type = other DNA
tgtcgacgagaacgaactgag

SEQ ID NO: 6082 - DNA, 21 bp, synthetic construct
  misc_feature 1..21: note = Synthetic construct
  source 1..21: mol_type = other DNA
gtcgacgagaacgaactgagt

SEQ ID NO: 6083 - DNA, 21 bp, synthetic construct
  misc_feature 1..21: note = Synthetic construct
  source 1..21: mol_type = other DNA
tcgacgagaacgaactgagta

SEQ ID NO: 6084 - DNA, 21 bp, synthetic construct
  misc_feature 1..21: note = Synthetic construct
  source 1..21: mol_type = other DNA
cgacgagaacgaactgagtaa

SEQ ID NO: 6085 - DNA, 21 bp, synthetic construct
  misc_feature 1..21: note = Synthetic construct
  source 1..21: mol_type = other DNA
gacgagaacgaactgagtaaa

SEQ ID NO: 6086 - DNA, 21 bp, synthetic construct
  misc_feature 1..21: note = Synthetic construct
  source 1..21: mol_type = other DNA
acgagaacgaactgagtaaag

SEQ ID NO: 6087 - DNA, 21 bp, synthetic construct
  misc_feature 1..21: note = Synthetic construct
  source 1..21: mol_type = other DNA
cgagaacgaactgagtaaagt

SEQ ID NO: 6088 - DNA, 21 bp, synthetic construct
  misc_feature 1..21: note = Synthetic construct
  source 1..21: mol_type = other DNA
gagaacgaactgagtaaagtt

SEQ ID NO: 6089 - DNA, 21 bp, synthetic construct
  misc_feature 1..21: note = Synthetic construct
  source 1..21: mol_type = other DNA
agaacgaactgagtaaagtta

SEQ ID NO: 6090 - DNA, 21 bp, synthetic construct
  misc_feature 1..21: note = Synthetic construct
  source 1..21: mol_type = other DNA
gaacgaactgagtaaagttag

SEQ ID NO: 6091 - DNA, 21 bp, synthetic construct
  misc_feature 1..21: note = Synthetic construct
  source 1..21: mol_type = other DNA
aacgaactgagtaaagttaga

SEQ ID NO: 6092 - DNA, 21 bp, synthetic construct
  misc_feature 1..21: note = Synthetic construct
  source 1..21: mol_type = other DNA
acgaactgagtaaagttagaa

SEQ ID NO: 6093 - DNA, 21 bp, synthetic construct
  misc_feature 1..21: note = Synthetic construct
  source 1..21: mol_type = other DNA
cgaactgagtaaagttagaag

SEQ ID NO: 6094 - DNA, 21 bp, synthetic construct
  misc_feature 1..21: note = Synthetic construct
  source 1..21: mol_type = other DNA
gaactgagtaaagttagaagc

SEQ ID NO: 6095 - DNA, 21 bp, synthetic construct
  misc_feature 1..21: note = Synthetic construct
  source 1..21: mol_type = other DNA
aactgagtaaagttagaagcc

SEQ ID NO: 6096 - DNA, 21 bp, synthetic construct
  misc_feature 1..21: note = Synthetic construct
  source 1..21: mol_type = other DNA
actgagtaaagttagaagcca

SEQ ID NO: 6097 - DNA, 21 bp, synthetic construct
  misc_feature 1..21: note = Synthetic construct
  source 1..21: mol_type = other DNA
ctgagtaaagttagaagccat

SEQ ID NO: 6098 - DNA, 21 bp, synthetic construct
  misc_feature 1..21: note = Synthetic construct
  source 1..21: mol_type = other DNA
tgagtaaagttagaagccatg

SEQ ID NO: 6099 - DNA, 21 bp, synthetic construct
  misc_feature 1..21: note = Synthetic construct
  source 1..21: mol_type = other DNA
gagtaaagttagaagccatgc

SEQ ID NO: 6100 - DNA, 21 bp, synthetic construct
  misc_feature 1..21: note = Synthetic construct
  source 1..21: mol_type = other DNA
agtaaagttagaagccatgct

SEQ ID NO: 6101 - DNA, 21 bp, synthetic construct
  misc_feature 1..21: note = Synthetic construct
  source 1..21: mol_type = other DNA
gtaaagttagaagccatgctt

SEQ ID NO: 6102 - DNA, 21 bp, synthetic construct
  misc_feature 1..21: note = Synthetic construct
  source 1..21: mol_type = other DNA
taaagttagaagccatgcttc

SEQ ID NO: 6103 - DNA, 21 bp, synthetic construct
  misc_feature 1..21: note = Synthetic construct
  source 1..21: mol_type = other DNA
aaagttagaagccatgcttca

SEQ ID NO: 6104 - DNA, 21 bp, synthetic construct
  misc_feature 1..21: note = Synthetic construct
  source 1..21: mol_type = other DNA
aagttagaagccatgcttcaa

SEQ ID NO: 6105 - DNA, 21 bp, synthetic construct
  misc_feature 1..21: note = Synthetic construct
  source 1..21: mol_type = other DNA
agttagaagccatgcttcaaa

SEQ ID NO: 6106 - DNA, 21 bp, synthetic construct
  misc_feature 1..21: note = Synthetic construct
  source 1..21: mol_type = other DNA
gttagaagccatgcttcaaac

SEQ ID NO: 6107 - DNA, 21 bp, synthetic construct
  misc_feature 1..21: note = Synthetic construct
  source 1..21: mol_type = other DNA
ttagaagccatgcttcaaact

SEQ ID NO: 6108 - DNA, 21 bp, synthetic construct
  misc_feature 1..21: note = Synthetic construct
  source 1..21: mol_type = other DNA
tagaagccatgcttcaaactc

SEQ ID NO: 6109 - DNA, 21 bp, synthetic construct
  misc_feature 1..21: note = Synthetic construct
  source 1..21: mol_type = other DNA
agaagccatgcttcaaactcc

SEQ ID NO: 6110 - DNA, 21 bp, synthetic construct
  misc_feature 1..21: note = Synthetic construct
  source 1..21: mol_type = other DNA
gaagccatgcttcaaactccg

SEQ ID NO: 6111 - DNA, 21 bp, synthetic construct
  misc_feature 1..21: note = Synthetic construct
  source 1..21: mol_type = other DNA
aagccatgcttcaaactccgg

SEQ ID NO: 6112 - DNA, 21 bp, synthetic construct
  misc_feature 1..21: note = Synthetic construct
  source 1..21: mol_type = other DNA
agccatgcttcaaactccggt

SEQ ID NO: 6113 - DNA, 21 bp, synthetic construct
  misc_feature 1..21: note = Synthetic construct
  source 1..21: mol_type = other DNA
gccatgcttcaaactccggtt

SEQ ID NO: 6114 - DNA, 21 bp, synthetic construct
  misc_feature 1..21: note = Synthetic construct
  source 1..21: mol_type = other DNA
ccatgcttcaaactccggttg

SEQ ID NO: 6115 - DNA, 21 bp, synthetic construct
  misc_feature 1..21: note = Synthetic construct
  source 1..21: mol_type = other DNA
catgcttcaaactccggttga

SEQ ID NO: 6116 - DNA, 21 bp, synthetic construct
  misc_feature 1..21: note = Synthetic construct
  source 1..21: mol_type = other DNA
atgcttcaaactccggttgag

SEQ ID NO: 6117 - DNA, 21 bp, synthetic construct
  misc_feature 1..21: note = Synthetic construct
  source 1..21: mol_type = other DNA
tgcttcaaactccggttgagg

SEQ ID NO: 6118 - DNA, 21 bp, synthetic construct
  misc_feature 1..21: note = Synthetic construct
  source 1..21: mol_type = other DNA
gcttcaaactccggttgaggg

SEQ ID NO: 6119 - DNA, 21 bp, synthetic construct
  misc_feature 1..21: note = Synthetic construct
  source 1..21: mol_type = other DNA
cttcaaactccggttgagggc

SEQ ID NO: 6120 - DNA, 21 bp, synthetic construct
  misc_feature 1..21: note = Synthetic construct
  source 1..21: mol_type = other DNA
ttcaaactccggttgagggct

SEQ ID NO: 6121 - DNA, 21 bp, synthetic construct
  misc_feature 1..21: note = Synthetic construct
  source 1..21: mol_type = other DNA
tcaaactccggttgagggctc

SEQ ID NO: 6122 - DNA, 21 bp, synthetic construct
  misc_feature 1..21: note = Synthetic construct
  source 1..21: mol_type = other DNA
caaactccggttgagggctct

SEQ ID NO: 6123 - DNA, 21 bp, synthetic construct
  misc_feature 1..21: note = Synthetic construct
  source 1..21: mol_type = other DNA
aaactccggttgagggctcta

SEQ ID NO: 6124 - DNA, 21 bp, synthetic construct
  misc_feature 1..21: note = Synthetic construct
  source 1..21: mol_type = other DNA
aactccggttgagggctctat

SEQ ID NO: 6125 - DNA, 21 bp, synthetic construct
  misc_feature 1..21: note = Synthetic construct
  source 1..21: mol_type = other DNA
actccggttgagggctctatc

SEQ ID NO: 6126 - DNA, 21 bp, synthetic construct
  misc_feature 1..21: note = Synthetic construct
  source 1..21: mol_type = other DNA
ctccggttgagggctctatct

SEQ ID NO: 6127 - DNA, 21 bp, synthetic construct
  misc_feature 1..21: note = Synthetic construct
  source 1..21: mol_type = other DNA
tccggttgagggctctatcta

SEQ ID NO: 6128 - DNA, 21 bp, synthetic construct
  misc_feature 1..21: note = Synthetic construct
  source 1..21: mol_type = other DNA
ccggttgagggctctatctag

SEQ ID NO: 6129 - DNA, 21 bp, synthetic construct
  misc_feature 1..21: note = Synthetic construct
  source 1..21: mol_type = other DNA
cggttgagggctctatctaga

SEQ ID NO: 6130 - DNA, 21 bp, synthetic construct
  misc_feature 1..21: note = Synthetic construct
  source 1..21: mol_type = other DNA
ggttgagggctctatctagag

SEQ ID NO: 6131 - DNA, 21 bp, synthetic construct
  misc_feature 1..21: note = Synthetic construct
  source 1..21: mol_type = other DNA
gttgagggctctatctagaga

SEQ ID NO: 6132 - DNA, 21 bp, synthetic construct
  misc_feature 1..21: note = Synthetic construct
  source 1..21: mol_type = other DNA
ttgagggctctatctagagag

SEQ ID NO: 6133 - DNA, 21 bp, synthetic construct
  misc_feature 1..21: note = Synthetic construct
  source 1..21: mol_type = other DNA
tgagggctctatctagagagc

SEQ ID NO: 6134 - DNA, 21 bp, synthetic construct
  misc_feature 1..21: note = Synthetic construct
  source 1..21: mol_type = other DNA
gagggctctatctagagagcc

SEQ ID NO: 6135 - DNA, 21 bp, synthetic construct
  misc_feature 1..21: note = Synthetic construct
  source 1..21: mol_type = other DNA
agggctctatctagagagccg

SEQ ID NO: 6136 - DNA, 21 bp, synthetic construct
  misc_feature 1..21: note = Synthetic construct
  source 1..21: mol_type = other DNA
gggctctatctagagagccgt

SEQ ID NO: 6137 - DNA, 21 bp, synthetic construct
  misc_feature 1..21: note = Synthetic construct
  source 1..21: mol_type = other DNA
ggctctatctagagagccgtt

SEQ ID NO: 6138 - DNA, 21 bp, synthetic construct
  misc_feature 1..21: note = Synthetic construct
  source 1..21: mol_type = other DNA
gctctatctagagagccgttg

SEQ ID NO: 6139 - DNA, 21 bp, synthetic construct
  misc_feature 1..21: note = Synthetic construct
  source 1..21: mol_type = other DNA
ctctatctagagagccgttgc

SEQ ID NO: 6140 - DNA, 21 bp, synthetic construct
  misc_feature 1..21: note = Synthetic construct
  source 1..21: mol_type = other DNA
tctatctagagagccgttgcc

SEQ ID NO: 6141 - DNA, 21 bp, synthetic construct
  misc_feature 1..21: note = Synthetic construct
  source 1..21: mol_type = other DNA
ctatctagagagccgttgcct

SEQ ID NO: 6142 - DNA, 21 bp, synthetic construct
  misc_feature 1..21: note = Synthetic construct
  source 1..21: mol_type = other DNA
tatctagagagccgttgcctg

SEQ ID NO: 6143 - DNA, 21 bp, synthetic construct
  misc_feature 1..21: note = Synthetic construct
  source 1..21: mol_type = other DNA
atctagagagccgttgcctga

SEQ ID NO: 6144 - DNA, 21 bp, synthetic construct
  misc_feature 1..21: note = Synthetic construct
  source 1..21: mol_type = other DNA
tctagagagccgttgcctgat

SEQ ID NO: 6145 - DNA, 21 bp, synthetic construct
  misc_feature 1..21: note = Synthetic construct
  source 1..21: mol_type = other DNA
ctagagagccgttgcctgatt

SEQ ID NO: 6146 - DNA, 21 bp, synthetic construct
  misc_feature 1..21: note = Synthetic construct
  source 1..21: mol_type = other DNA
tagagagccgttgcctgatta

SEQ ID NO: 6147 - DNA, 21 bp, synthetic construct
  misc_feature 1..21: note = Synthetic construct
  source 1..21: mol_type = other DNA
agagagccgttgcctgattaa

SEQ ID NO: 6148 - DNA, 21 bp, synthetic construct
  misc_feature 1..21: note = Synthetic construct
  source 1..21: mol_type = other DNA
gagagccgttgcctgattaat

SEQ ID NO: 6149 - DNA, 21 bp, synthetic construct
  misc_feature 1..21: note = Synthetic construct
  source 1..21: mol_type = other DNA
agagccgttgcctgattaatg

SEQ ID NO: 6150 - DNA, 21 bp, synthetic construct
  misc_feature 1..21: note = Synthetic construct
  source 1..21: mol_type = other DNA
gagccgttgcctgattaatgc

SEQ ID NO: 6151 - DNA, 21 bp, synthetic construct
  misc_feature 1..21: note = Synthetic construct
  source 1..21: mol_type = other DNA
agccgttgcctgattaatgct

SEQ ID NO: 6152 - DNA, 21 bp, synthetic construct
  misc_feature 1..21: note = Synthetic construct
  source 1..21: mol_type = other DNA
gccgttgcctgattaatgcta

SEQ ID NO: 6153 - DNA, 21 bp, synthetic construct
  misc_feature 1..21: note = Synthetic construct
  source 1..21: mol_type = other DNA
ccgttgcctgattaatgctaa

SEQ ID NO: 6154 - DNA, 21 bp, synthetic construct
  misc_feature 1..21: note = Synthetic construct
  source 1..21: mol_type = other DNA
cgttgcctgattaatgctaac

SEQ ID NO: 6155 - DNA, 21 bp, synthetic construct
  misc_feature 1..21: note = Synthetic construct
  source 1..21: mol_type = other DNA
gttgcctgattaatgctaacg

SEQ ID NO: 6156 - DNA, 21 bp, synthetic construct
  misc_feature 1..21: note = Synthetic construct
  source 1..21: mol_type = other DNA
ttgcctgattaatgctaacgc

SEQ ID NO: 6157 - DNA, 21 bp, synthetic construct
  misc_feature 1..21: note = Synthetic construct
  source 1..21: mol_type = other DNA
tgcctgattaatgctaacgca

SEQ ID NO: 6158 - DNA, 21 bp, synthetic construct
  misc_feature 1..21: note = Synthetic construct
  source 1..21: mol_type = other DNA
gcctgattaatgctaacgcat

SEQ ID NO: 6159 - DNA, 21 bp, synthetic construct
  misc_feature 1..21: note = Synthetic construct
  source 1..21: mol_type = other DNA
cctgattaatgctaacgcatc

SEQ ID NO: 6160 - DNA, 21 bp, synthetic construct
  misc_feature 1..21: note = Synthetic construct
  source 1..21: mol_type = other DNA
ctgattaatgctaacgcatct

SEQ ID NO: 6161 - DNA, 21 bp, synthetic construct
  misc_feature 1..21: note = Synthetic construct
  source 1..21: mol_type = other DNA
tgattaatgctaacgcatcta

SEQ ID NO: 6162 - DNA, 21 bp, synthetic construct
  misc_feature 1..21: note = Synthetic construct
  source 1..21: mol_type = other DNA
gattaatgctaacgcatctaa

SEQ ID NO: 6163 - DNA, 21 bp, synthetic construct
  misc_feature 1..21: note = Synthetic construct
  source 1..21: mol_type = other DNA
attaatgctaacgcatctaag

SEQ ID NO: 6164 - DNA, 21 bp, synthetic construct
  misc_feature 1..21: note = Synthetic construct
  source 1..21: mol_type = other DNA
ttaatgctaacgcatctaagg

SEQ ID NO: 6165 - DNA, 21 bp, synthetic construct
  misc_feature 1..21: note = Synthetic construct
  source 1..21: mol_type = other DNA
taatgctaacgcatctaaggt

SEQ ID NO: 6166 - DNA, 21 bp, synthetic construct
  misc_feature 1..21: note = Synthetic construct
  source 1..21: mol_type = other DNA
aatgctaacgcatctaaggta

SEQ ID NO: 6167 - DNA, 21 bp, synthetic construct
  misc_feature 1..21: note = Synthetic construct
  source 1..21: mol_type = other DNA
atgctaacgcatctaaggtat

SEQ ID NO: 6168 - DNA, 21 bp, synthetic construct
  misc_feature 1..21: note = Synthetic construct
  source 1..21: mol_type = other DNA
tgctaacgcatctaaggtatg

SEQ ID NO: 6169 - DNA, 21 bp, synthetic construct
  misc_feature 1..21: note = Synthetic construct
  source 1..21: mol_type = other DNA
gctaacgcatctaaggtatgg

SEQ ID NO: 6170 - DNA, 21 bp, synthetic construct
  misc_feature 1..21: note = Synthetic construct
  source 1..21: mol_type = other DNA
ctaacgcatctaaggtatgga

SEQ ID NO: 6171 - DNA, 21 bp, synthetic construct
  misc_feature 1..21: note = Synthetic construct
  source 1..21: mol_type = other DNA
taacgcatctaaggtatggac

SEQ ID NO: 6172 - DNA, 21 bp, synthetic construct
  misc_feature 1..21: note = Synthetic construct
  source 1..21: mol_type = other DNA
aacgcatctaaggtatggacc

SEQ ID NO: 6173 - DNA, 21 bp, synthetic construct
  misc_feature 1..21: note = Synthetic construct
  source 1..21: mol_type = other DNA
acgcatctaaggtatggacca

SEQ ID NO: 6174 - DNA, 21 bp, synthetic construct
  misc_feature 1..21: note = Synthetic construct
  source 1..21: mol_type = other DNA
cgcatctaaggtatggaccat

SEQ ID NO: 6175 - DNA, 21 bp, synthetic construct
  misc_feature 1..21: note = Synthetic construct
  source 1..21: mol_type = other DNA
gcatctaaggtatggaccatc

SEQ ID NO: 6176 - DNA, 21 bp, synthetic construct
  misc_feature 1..21: note = Synthetic construct
  source 1..21: mol_type = other DNA
catctaaggtatggaccatcg

SEQ ID NO: 6177 - DNA, 21 bp, synthetic construct
  misc_feature 1..21: note = Synthetic construct
  source 1..21: mol_type = other DNA
atctaaggtatggaccatcga

SEQ ID NO: 6178 - DNA, 21 bp, synthetic construct
  misc_feature 1..21: note = Synthetic construct
  source 1..21: mol_type = other DNA
tctaaggtatggaccatcgag

SEQ ID NO: 6179 - DNA, 21 bp, synthetic construct
  misc_feature 1..21: note = Synthetic construct
  source 1..21: mol_type = other DNA
ctaaggtatggaccatcgaga

SEQ ID NO: 6180 - DNA, 21 bp, synthetic construct
  misc_feature 1..21: note = Synthetic construct
  source 1..21: mol_type = other DNA
taaggtatggaccatcgagaa

SEQ ID NO: 6181 - DNA, 21 bp, synthetic construct
  misc_feature 1..21: note = Synthetic construct
  source 1..21: mol_type = other DNA
aaggtatggaccatcgagaaa

SEQ ID NO: 6182 - DNA, 21 bp, synthetic construct
  misc_feature 1..21: note = Synthetic construct
  source 1..21: mol_type = other DNA
aggtatggaccatcgagaaag

SEQ ID NO: 6183 - DNA, 21 bp, synthetic construct
  misc_feature 1..21: note = Synthetic construct
  source 1..21: mol_type = other DNA
ggtatggaccatcgagaaagg

SEQ ID NO: 6184 - DNA, 21 bp, synthetic construct
  misc_feature 1..21: note = Synthetic construct
  source 1..21: mol_type = other DNA
gtatggaccatcgagaaagga

SEQ ID NO: 6185 - DNA, 21 bp, synthetic construct
  misc_feature 1..21: note = Synthetic construct
  source 1..21: mol_type = other DNA
tatggaccatcgagaaaggag

SEQ ID NO: 6186 - DNA, 21 bp, synthetic construct
  misc_feature 1..21: note = Synthetic construct
  source 1..21: mol_type = other DNA
atggaccatcgagaaaggaga

SEQ ID NO: 6187 - DNA, 21 bp, synthetic construct
  misc_feature 1..21: note = Synthetic construct
  source 1..21: mol_type = other DNA
tggaccatcgagaaaggagac

SEQ ID NO: 6188 - DNA, 21 bp, synthetic construct
  misc_feature 1..21: note = Synthetic construct
  source 1..21: mol_type = other DNA
ggaccatcgagaaaggagact

SEQ ID NO: 6189 - DNA, 21 bp, synthetic construct
  misc_feature 1..21: note = Synthetic construct
  source 1..21: mol_type = other DNA
gaccatcgagaaaggagactt

SEQ ID NO: 6190 - DNA, 21 bp, synthetic construct
  misc_feature 1..21: note = Synthetic construct
  source 1..21: mol_type = other DNA
accatcgagaaaggagacttt

SEQ ID NO: 6191 - DNA, 21 bp, synthetic construct
  misc_feature 1..21: note = Synthetic construct
  source 1..21: mol_type = other DNA
ccatcgagaaaggagacttta

SEQ ID NO: 6192 - DNA, 21 bp, synthetic construct
  misc_feature 1..21: note = Synthetic construct
  source 1..21: mol_type = other DNA
catcgagaaaggagactttac

SEQ ID NO: 6193 - DNA, 21 bp, synthetic construct
  misc_feature 1..21: note = Synthetic construct
  source 1..21: mol_type = other DNA
atcgagaaaggagactttacg

SEQ ID NO: 6194 - DNA, 21 bp, synthetic construct
  misc_feature 1..21: note = Synthetic construct
  source 1..21: mol_type = other DNA
tcgagaaaggagactttacgt

SEQ ID NO: 6195 - DNA, 21 bp, synthetic construct
  misc_feature 1..21: note = Synthetic construct
  source 1..21: mol_type = other DNA
cgagaaaggagactttacgta

SEQ ID NO: 6196 - DNA, 21 bp, synthetic construct
  misc_feature 1..21: note = Synthetic construct
  source 1..21: mol_type = other DNA
gagaaaggagactttacgtac

SEQ ID NO: 6197 - DNA, 21 bp, synthetic construct
  misc_feature 1..21: note = Synthetic construct
  source 1..21: mol_type = other DNA
agaaaggagactttacgtacg

SEQ ID NO: 6198 - DNA, 21 bp, synthetic construct
  misc_feature 1..21: note = Synthetic construct
  source 1..21: mol_type = other DNA
gaaaggagactttacgtacgc

SEQ ID NO: 6199 - DNA, 21 bp, synthetic construct
  misc_feature 1..21: note = Synthetic construct
  source 1..21: mol_type = other DNA
aaaggagactttacgtacgcg

SEQ ID NO: 6200 - DNA, 21 bp, synthetic construct
  misc_feature 1..21: note = Synthetic construct
  source 1..21: mol_type = other DNA
aaggagactttacgtacgcgc

SEQ ID NO: 6201 - DNA, 21 bp, synthetic construct
  misc_feature 1..21: note = Synthetic construct
  source 1..21: mol_type = other DNA
aggagactttacgtacgcgcc

SEQ ID NO: 6202 - DNA, 21 bp, synthetic construct
  misc_feature 1..21: note = Synthetic construct
  source 1..21: mol_type = other DNA
ggagactttacgtacgcgcca

SEQ ID NO: 6203 - DNA, 21 bp, synthetic construct
  misc_feature 1..21: note = Synthetic construct
  source 1..21: mol_type = other DNA
gagactttacgtacgcgccag

SEQ ID NO: 6204 - DNA, 21 bp, synthetic construct
  misc_feature 1..21: note = Synthetic construct
  source 1..21: mol_type = other DNA
agactttacgtacgcgccagt

SEQ ID NO: 6205 - DNA, 21 bp, synthetic construct
  misc_feature 1..21: note = Synthetic construct
  source 1..21: mol_type = other DNA
gactttacgtacgcgccagtt

SEQ ID NO: 6206 - DNA, 21 bp, synthetic construct
  misc_feature 1..21: note = Synthetic construct
  source 1..21: mol_type = other DNA
actttacgtacgcgccagttg

SEQ ID NO: 6207 - DNA, 21 bp, synthetic construct
  misc_feature 1..21: note = Synthetic construct
  source 1..21: mol_type = other DNA
ctttacgtacgcgccagttgt

SEQ ID NO: 6208 - DNA, 21 bp, synthetic construct
  misc_feature 1..21: note = Synthetic construct
  source 1..21: mol_type = other DNA
tttacgtacgcgccagttgtt

SEQ ID NO: 6209 - DNA, 21 bp, synthetic construct
  misc_feature 1..21: note = Synthetic construct
  source 1..21: mol_type = other DNA
ttacgtacgcgccagttgttg

SEQ ID NO: 6210 - DNA, 21 bp, synthetic construct
  misc_feature 1..21: note = Synthetic construct
  source 1..21: mol_type = other DNA
tacgtacgcgccagttgttgg

SEQ ID NO: 6211 - DNA, 21 bp, synthetic construct
  misc_feature 1..21: note = Synthetic construct
  source 1..21: mol_type = other DNA
acgtacgcgccagttgttggc

SEQ ID NO: 6212 - DNA, 21 bp, synthetic construct
  misc_feature 1..21: note = Synthetic construct
  source 1..21: mol_type = other DNA
cgtacgcgccagttgttggcc

SEQ ID NO: 6213 - DNA, 21 bp, synthetic construct
  misc_feature 1..21: note = Synthetic construct
  source 1..21: mol_type = other DNA
gtacgcgccagttgttggcca

SEQ ID NO: 6214 - DNA, 21 bp, synthetic construct
  misc_feature 1..21: note = Synthetic construct
  source 1..21: mol_type = other DNA
tacgcgccagttgttggccat

SEQ ID NO: 6215 - DNA, 21 bp, synthetic construct
  misc_feature 1..21: note = Synthetic construct
  source 1..21: mol_type = other DNA
acgcgccagttgttggccata

SEQ ID NO: 6216 - DNA, 21 bp, synthetic construct
  misc_feature 1..21: note = Synthetic construct
  source 1..21: mol_type = other DNA
cgcgccagttgttggccatac

SEQ ID NO: 6217 - DNA, 21 bp, synthetic construct
  misc_feature 1..21: note = Synthetic construct
  source 1..21: mol_type = other DNA
gcgccagttgttggccatacg

SEQ ID NO: 6218 - DNA, 21 bp, synthetic construct
  misc_feature 1..21: note = Synthetic construct
  source 1..21: mol_type = other DNA
cgccagttgttggccatacgg

SEQ ID NO: 6219 - DNA, 21 bp, synthetic construct
  misc_feature 1..21: note = Synthetic construct
  source 1..21: mol_type = other DNA
gccagttgttggccatacgga

SEQ ID NO: 6220 - DNA, 21 bp, synthetic construct
  misc_feature 1..21: note = Synthetic construct
  source 1..21: mol_type = other DNA
ccagttgttggccatacggat

SEQ ID NO: 6221 - DNA, 21 bp, synthetic construct
  misc_feature 1..21: note = Synthetic construct
  source 1..21: mol_type = other DNA
cagttgttggccatacggatt

SEQ ID NO: 6222 - DNA, 21 bp, synthetic construct
  misc_feature 1..21: note = Synthetic construct
  source 1..21: mol_type = other DNA
agttgttggccatacggattg

SEQ ID NO: 6223 - DNA, 21 bp, synthetic construct
  misc_feature 1..21: note = Synthetic construct
  source 1..21: mol_type = other DNA
gttgttggccatacggattgt

SEQ ID NO: 6224 - DNA, 21 bp, synthetic construct
  misc_feature 1..21: note = Synthetic construct
  source 1..21: mol_type = other DNA
ttgttggccatacggattgta

SEQ ID NO: 6225 - DNA, 21 bp, synthetic construct
  misc_feature 1..21: note = Synthetic construct
  source 1..21: mol_type = other DNA
tgttggccatacggattgtac

SEQ ID NO: 6226 - DNA, 21 bp, synthetic construct
  misc_feature 1..21: note = Synthetic construct
  source 1..21: mol_type = other DNA
gttggccatacggattgtacc

SEQ ID NO: 6227 - DNA, 21 bp, synthetic construct
  misc_feature 1..21: note = Synthetic construct
  source 1..21: mol_type = other DNA
ttggccatacggattgtaccc

SEQ ID NO: 6228 - DNA, 21 bp, synthetic construct
  misc_feature 1..21: note = Synthetic construct
  source 1..21: mol_type = other DNA
tggccatacggattgtacccc

SEQ ID NO: 6229 - DNA, 21 bp, synthetic construct
  misc_feature 1..21: note = Synthetic construct
  source 1..21: mol_type = other DNA
ggccatacggattgtacccct

SEQ ID NO: 6230 - DNA, 21 bp, synthetic construct
  misc_feature 1..21: note = Synthetic construct
  source 1..21: mol_type = other DNA
gccatacggattgtacccctc

SEQ ID NO: 6231 - DNA, 21 bp, synthetic construct
  misc_feature 1..21: note = Synthetic construct
  source 1..21: mol_type = other DNA
ccatacggattgtacccctcg

SEQ ID NO: 6232 - DNA, 21 bp, synthetic construct
  misc_feature 1..21: note = Synthetic construct
  source 1..21: mol_type = other DNA
catacggattgtacccctcga

SEQ ID NO: 6233 - DNA, 21 bp, synthetic construct
  misc_feature 1..21: note = Synthetic construct
  source 1..21: mol_type = other DNA
atacggattgtacccctcgat

SEQ ID NO: 6234 - DNA, 21 bp, synthetic construct
  misc_feature 1..21: note = Synthetic construct
  source 1..21: mol_type = other DNA
tacggattgtacccctcgatg

SEQ ID NO: 6235 - DNA, 21 bp, synthetic construct
  misc_feature 1..21: note = Synthetic construct
  source 1..21: mol_type = other DNA
acggattgtacccctcgatgc

SEQ ID NO: 6236 - DNA, 21 bp, synthetic construct
  misc_feature 1..21: note = Synthetic construct
  source 1..21: mol_type = other DNA
cggattgtacccctcgatgca

SEQ ID NO: 6237 - DNA, 21 bp, synthetic construct
  misc_feature 1..21: note = Synthetic construct
  source 1..21: mol_type = other DNA
ggattgtacccctcgatgcat

SEQ ID NO: 6238 - DNA, 21 bp, synthetic construct
  misc_feature 1..21: note = Synthetic construct
  source 1..21: mol_type = other DNA
gattgtacccctcgatgcatg

SEQ ID NO: 6239 - DNA, 21 bp, synthetic construct
  misc_feature 1..21: note = Synthetic construct
  source 1..21: mol_type = other DNA
attgtacccctcgatgcatgg

SEQ ID NO: 6240 - DNA, 21 bp, synthetic construct
  misc_feature 1..21: note = Synthetic construct
  source 1..21: mol_type = other DNA
ttgtacccctcgatgcatggc

SEQ ID NO: 6241 - DNA, 21 bp, synthetic construct
  misc_feature 1..21: note = Synthetic construct
  source 1..21: mol_type = other DNA
tgtacccctcgatgcatggct

SEQ ID NO: 6242 - DNA, 21 bp, synthetic construct
  misc_feature 1..21: note = Synthetic construct
  source 1..21: mol_type = other DNA
gtacccctcgatgcatggctg

SEQ ID NO: 6243 - DNA, 21 bp, synthetic construct
  misc_feature 1..21: note = Synthetic construct
  source 1..21: mol_type = other DNA
tacccctcgatgcatggctga

SEQ ID NO: 6244 - DNA, 21 bp, synthetic construct
  misc_feature 1..21: note = Synthetic construct
  source 1..21: mol_type = other DNA
acccctcgatgcatggctgag

SEQ ID NO: 6245 - DNA, 21 bp, synthetic construct
  misc_feature 1..21: note = Synthetic construct
  source 1..21: mol_type = other DNA
cccctcgatgcatggctgaga

SEQ ID NO: 6246 - DNA, 21 bp, synthetic construct
  misc_feature 1..21: note = Synthetic construct
  source 1..21: mol_type = other DNA
ccctcgatgcatggctgagat

SEQ ID NO: 6247 - DNA, 21 bp, synthetic construct
  misc_feature 1..21: note = Synthetic construct
  source 1..21: mol_type = other DNA
cctcgatgcatggctgagatt

SEQ ID NO: 6248 - DNA, 21 bp, synthetic construct
  misc_feature 1..21: note = Synthetic construct
  source 1..21: mol_type = other DNA
ctcgatgcatggctgagattt

SEQ ID NO: 6249 - DNA, 21 bp, synthetic construct
  misc_feature 1..21: note = Synthetic construct
  source 1..21: mol_type = other DNA
tcgatgcatggctgagatttg

SEQ ID NO: 6250 - DNA, 21 bp, synthetic construct
  misc_feature 1..21: note = Synthetic construct
  source 1..21: mol_type = other DNA
cgatgcatggctgagatttgg

SEQ ID NO: 6251 - DNA, 21 bp, synthetic construct
  misc_feature 1..21: note = Synthetic construct
  source 1..21: mol_type = other DNA
gatgcatggctgagatttggg

SEQ ID NO: 6252 - DNA, 21 bp, synthetic construct
  misc_feature 1..21: note = Synthetic construct
  source 1..21: mol_type = other DNA
atgcatggctgagatttgggc

SEQ ID NO: 6253 - DNA, 21 bp, synthetic construct
  misc_feature 1..21: note = Synthetic construct
  source 1..21: mol_type = other DNA
tgcatggctgagatttgggcc

SEQ ID NO: 6254 - DNA, 21 bp, synthetic construct
  misc_feature 1..21: note = Synthetic construct
  source 1..21: mol_type = other DNA
gcatggctgagatttgggcct

SEQ ID NO: 6255 - DNA, 21 bp, synthetic construct
  misc_feature 1..21: note = Synthetic construct
  source 1..21: mol_type = other DNA
catggctgagatttgggcctt

SEQ ID NO: 6256 - DNA, 21 bp, synthetic construct
  misc_feature 1..21: note = Synthetic construct
  source 1..21: mol_type = other DNA
atggctgagatttgggcctta

SEQ ID NO: 6257 - DNA, 21 bp, synthetic construct
  misc_feature 1..21: note = Synthetic construct
  source 1..21: mol_type = other DNA
tggctgagatttgggccttag

SEQ ID NO: 6258 - DNA, 21 bp, synthetic construct
  misc_feature 1..21: note = Synthetic construct
  source 1..21: mol_type = other DNA
ggctgagatttgggccttagc

SEQ ID NO: 6259 - DNA, 21 bp, synthetic construct
  misc_feature 1..21: note = Synthetic construct
  source 1..21: mol_type = other DNA
gctgagatttgggccttagca

SEQ ID NO: 6260 - DNA, 21 bp, synthetic construct
  misc_feature 1..21: note = Synthetic construct
  source 1..21: mol_type = other DNA
ctgagatttgggccttagcag

SEQ ID NO: 6261 - DNA, 21 bp, synthetic construct
  misc_feature 1..21: note = Synthetic construct
  source 1..21: mol_type = other DNA
tgagatttgggccttagcagt

SEQ ID NO: 6262 - DNA, 21 bp, synthetic construct
  misc_feature 1..21: note = Synthetic construct
  source 1..21: mol_type = other DNA
gagatttgggccttagcagtg

SEQ ID NO: 6263 - DNA, 21 bp, synthetic construct
  misc_feature 1..21: note = Synthetic construct
  source 1..21: mol_type = other DNA
agatttgggccttagcagtgc

SEQ ID NO: 6264 - DNA, 21 bp, synthetic construct
  misc_feature 1..21: note = Synthetic construct
  source 1..21: mol_type = other DNA
gatttgggccttagcagtgcc

SEQ ID NO: 6265 - DNA, 21 bp, synthetic construct
  misc_feature 1..21: note = Synthetic construct
  source 1..21: mol_type = other DNA
atttgggccttagcagtgccc

SEQ ID NO: 6266 - DNA, 21 bp, synthetic construct
  misc_feature 1..21: note = Synthetic construct
  source 1..21: mol_type = other DNA
tttgggccttagcagtgccct

SEQ ID NO: 6267 - DNA, 21 bp, synthetic construct
  misc_feature 1..21: note = Synthetic construct
  source 1..21: mol_type = other DNA
ttgggccttagcagtgccctg

SEQ ID NO: 6268 - DNA, 21 bp, synthetic construct
  misc_feature 1..21: note = Synthetic construct
  source 1..21: mol_type = other DNA
tgggccttagcagtgccctgt

SEQ ID NO: 6269 - DNA, 21 bp, synthetic construct
  misc_feature 1..21: note = Synthetic construct
  source 1..21: mol_type = other DNA
gggccttagcagtgccctgtc

SEQ ID NO: 6270 - DNA, 21 bp, synthetic construct
  misc_feature 1..21: note = Synthetic construct
  source 1..21: mol_type = other DNA
ggccttagcagtgccctgtct

SEQ ID NO: 6271 - DNA, 21 bp, synthetic construct
  misc_feature 1..21: note = Synthetic construct
  source 1..21: mol_type = other DNA
gccttagcagtgccctgtctc

SEQ ID NO: 6272 - DNA, 21 bp, synthetic construct
  misc_feature 1..21: note = Synthetic construct
  source 1..21: mol_type = other DNA
ccttagcagtgccctgtctct

SEQ ID NO: 6273 - DNA, 21 bp, synthetic construct
  misc_feature 1..21: note = Synthetic construct
  source 1..21: mol_type = other DNA
cttagcagtgccctgtctctc

SEQ ID NO: 6274 - DNA, 21 bp, synthetic construct
  misc_feature 1..21: note = Synthetic construct
  source 1..21: mol_type = other DNA
ttagcagtgccctgtctctcc

SEQ ID NO: 6275 - DNA, 21 bp, synthetic construct
  misc_feature 1..21: note = Synthetic construct
  source 1..21: mol_type = other DNA
tagcagtgccctgtctctcca

SEQ ID NO: 6276 - DNA, 21 bp, synthetic construct
  misc_feature 1..21: note = Synthetic construct
  source 1..21: mol_type = other DNA
agcagtgccctgtctctccac

SEQ ID NO: 6277 - DNA, 21 bp, synthetic construct
  misc_feature 1..21: note = Synthetic construct
  source 1..21: mol_type = other DNA
gcagtgccctgtctctccaca

SEQ ID NO: 6278 - DNA, 21 bp, synthetic construct
  misc_feature 1..21: note = Synthetic construct
  source 1..21: mol_type = other DNA
cagtgccctgtctctccacag

SEQ ID NO: 6279 - DNA, 21 bp, synthetic construct
  misc_feature 1..21: note = Synthetic construct
  source 1..21: mol_type = other DNA
agtgccctgtctctccacagt

SEQ ID NO: 6280 - DNA, 21 bp, synthetic construct
  misc_feature 1..21: note = Synthetic construct
  source 1..21: mol_type = other DNA
gtgccctgtctctccacagtc

SEQ ID NO: 6281 - DNA, 21 bp, synthetic construct
  misc_feature 1..21: note = Synthetic construct
  source 1..21: mol_type = other DNA
tgccctgtctctccacagtcc

SEQ ID NO: 6282 - DNA, 21 bp, synthetic construct
  misc_feature 1..21: note = Synthetic construct
  source 1..21: mol_type = other DNA
gccctgtctctccacagtcca

SEQ ID NO: 6283 - DNA, 21 bp, synthetic construct
  misc_feature 1..21: note = Synthetic construct
  source 1..21: mol_type = other DNA
ccctgtctctccacagtccac

SEQ ID NO: 6284 - DNA, 21 bp, synthetic construct
  misc_feature 1..21: note = Synthetic construct
  source 1..21: mol_type = other DNA
cctgtctctccacagtccacc

SEQ ID NO: 6285 - DNA, 21 bp, synthetic construct
  misc_feature 1..21: note = Synthetic construct
  source 1..21: mol_type = other DNA
ctgtctctccacagtccaccc

SEQ ID NO: 6286 - DNA, 21 bp, synthetic construct
  misc_feature 1..21: note = Synthetic construct
  source 1..21: mol_type = other DNA
tgtctctccacagtccacccg

SEQ ID NO: 6287 - DNA, 21 bp, synthetic construct
  misc_feature 1..21: note = Synthetic construct
  source 1..21: mol_type = other DNA
gtctctccacagtccacccgt

SEQ ID NO: 6288 - DNA, 21 bp, synthetic construct
  misc_feature 1..21: note = Synthetic construct
  source 1..21: mol_type = other DNA
tctctccacagtccacccgta

SEQ ID NO: 6289 - DNA, 21 bp, synthetic construct
  misc_feature 1..21: note = Synthetic construct
  source 1..21: mol_type = other DNA
ctctccacagtccacccgtag

SEQ ID NO: 6290 - DNA, 21 bp, synthetic construct
  misc_feature 1..21: note = Synthetic construct
  source 1..21: mol_type = other DNA
tctccacagtccacccgtagg

SEQ ID NO: 6291 - DNA, 21 bp, synthetic construct
  misc_feature 1..21: note = Synthetic construct
  source 1..21: mol_type = other DNA
ctccacagtccacccgtaggg

SEQ ID NO: 6292 - DNA, 21 bp, synthetic construct
  misc_feature 1..21: note = Synthetic construct
  source 1..21: mol_type = other DNA
tccacagtccacccgtaggga

SEQ ID NO: 6293 - DNA, 21 bp, synthetic construct
  misc_feature 1..21: note = Synthetic construct
  source 1..21: mol_type = other DNA
ccacagtccacccgtagggag

SEQ ID NO: 6294 - DNA, 21 bp, synthetic construct
  misc_feature 1..21: note = Synthetic construct
  source 1..21: mol_type = other DNA
cacagtccacccgtagggagc

SEQ ID NO: 6295 - DNA, 21 bp, synthetic construct
  misc_feature 1..21: note = Synthetic construct
  source 1..21: mol_type = other DNA
acagtccacccgtagggagcg

SEQ ID NO: 6296 - DNA, 21 bp, synthetic construct
  misc_feature 1..21: note = Synthetic construct
  source 1..21: mol_type = other DNA
cagtccacccgtagggagcgt

SEQ ID NO: 6297 - DNA, 21 bp, synthetic construct
  misc_feature 1..21: note = Synthetic construct
  source 1..21: mol_type = other DNA
agtccacccgtagggagcgtc

SEQ ID NO: 6298 - DNA, 21 bp, synthetic construct
  misc_feature 1..21: note = Synthetic construct
  source 1..21: mol_type = other DNA
gtccacccgtagggagcgtca

SEQ ID NO: 6299 - DNA, 21 bp, synthetic construct
  misc_feature 1..21: note = Synthetic construct
  source 1..21: mol_type = other DNA
tccacccgtagggagcgtcaa

SEQ ID NO: 6300 - DNA, 21 bp, synthetic construct
  misc_feature 1..21: note = Synthetic construct
  source 1..21: mol_type = other DNA
ccacccgtagggagcgtcaac

SEQ ID NO: 6301 - DNA, 21 bp, synthetic construct
  misc_feature 1..21: note = Synthetic construct
  source 1..21: mol_type = other DNA
cacccgtagggagcgtcaacg

SEQ ID NO: 6302 - DNA, 21 bp, synthetic construct
  misc_feature 1..21: note = Synthetic construct
  source 1..21: mol_type = other DNA
acccgtagggagcgtcaacgc

SEQ ID NO: 6303 - DNA, 21 bp, synthetic construct
  misc_feature 1..21: note = Synthetic construct
  source 1..21: mol_type = other DNA
cccgtagggagcgtcaacgct

SEQ ID NO: 6304 - DNA, 21 bp, synthetic construct
  misc_feature 1..21: note = Synthetic construct
  source 1..21: mol_type = other DNA
ccgtagggagcgtcaacgctt

SEQ ID NO: 6305 - DNA, 21 bp, synthetic construct
  misc_feature 1..21: note = Synthetic construct
  source 1..21: mol_type = other DNA
cgtagggagcgtcaacgctta

SEQ ID NO: 6306 - DNA, 21 bp, synthetic construct
  misc_feature 1..21: note = Synthetic construct
  source 1..21: mol_type = other DNA
gtagggagcgtcaacgcttat

SEQ ID NO: 6307 - DNA, 21 bp, synthetic construct
  misc_feature 1..21: note = Synthetic construct
  source 1..21: mol_type = other DNA
tagggagcgtcaacgcttatg

SEQ ID NO: 6308 - DNA, 21 bp, synthetic construct
  misc_feature 1..21: note = Synthetic construct
  source 1..21: mol_type = other DNA
agggagcgtcaacgcttatga

SEQ ID NO: 6309 - DNA, 21 bp, synthetic construct
  misc_feature 1..21: note = Synthetic construct
  source 1..21: mol_type = other DNA
gggagcgtcaacgcttatgat

SEQ ID NO: 6310 - DNA, 21 bp, synthetic construct
  misc_feature 1..21: note = Synthetic construct
  source 1..21: mol_type = other DNA
ggagcgtcaacgcttatgatg

SEQ ID NO: 6311 - DNA, 21 bp, synthetic construct
  misc_feature 1..21: note = Synthetic construct
  source 1..21: mol_type = other DNA
gagcgtcaacgcttatgatgg

SEQ ID NO: 6312 - DNA, 21 bp, synthetic construct
  misc_feature 1..21: note = Synthetic construct
  source 1..21: mol_type = other DNA
agcgtcaacgcttatgatgga

SEQ ID NO: 6313 - DNA, 21 bp, synthetic construct
  misc_feature 1..21: note = Synthetic construct
  source 1..21: mol_type = other DNA
gcgtcaacgcttatgatggac

SEQ ID NO: 6314 - DNA, 21 bp, synthetic construct
  misc_feature 1..21: note = Synthetic construct
  source 1..21: mol_type = other DNA
cgtcaacgcttatgatggact

SEQ ID NO: 6315 - DNA, 21 bp, synthetic construct
  misc_feature 1..21: note = Synthetic construct
  source 1..21: mol_type = other DNA
gtcaacgcttatgatggactc

SEQ ID NO: 6316 - DNA, 21 bp, synthetic construct
  misc_feature 1..21: note = Synthetic construct
  source 1..21: mol_type = other DNA
tcaacgcttatgatggactca

SEQ ID NO: 6317 - DNA, 21 bp, synthetic construct
  misc_feature 1..21: note = Synthetic construct
  source 1..21: mol_type = other DNA
caacgcttatgatggactcac

SEQ ID NO: 6318 - DNA, 21 bp, synthetic construct
  misc_feature 1..21: note = Synthetic construct
  source 1..21: mol_type = other DNA
aacgcttatgatggactcacc

SEQ ID NO: 6319 - DNA, 21 bp, synthetic construct
  misc_feature 1..21: note = Synthetic construct
  source 1..21: mol_type = other DNA
acgcttatgatggactcaccc

SEQ ID NO: 6320 - DNA, 21 bp, synthetic construct
  misc_feature 1..21: note = Synthetic construct
  source 1..21: mol_type = other DNA
cgcttatgatggactcacccg

SEQ ID NO: 6321 - DNA, 21 bp, synthetic construct
  misc_feature 1..21: note = Synthetic construct
  source 1..21: mol_type = other DNA
gcttatgatggactcacccgt

SEQ ID NO: 6322 - DNA, 21 bp, synthetic construct
  misc_feature 1..21: note = Synthetic construct
  source 1..21: mol_type = other DNA
cttatgatggactcacccgtt

SEQ ID NO: 6323 - DNA, 21 bp, synthetic construct
  misc_feature 1..21: note = Synthetic construct
  source 1..21: mol_type = other DNA
ttatgatggactcacccgtta

SEQ ID NO: 6324 - DNA, 21 bp, synthetic construct
  misc_feature 1..21: note = Synthetic construct
  source 1..21: mol_type = other DNA
tatgatggactcacccgttat

SEQ ID NO: 6325 - DNA, 21 bp, synthetic construct
  misc_feature 1..21: note = Synthetic construct
  source 1..21: mol_type = other DNA
atgatggactcacccgttatt

SEQ ID NO: 6326 - DNA, 21 bp, synthetic construct
  misc_feature 1..21: note = Synthetic construct
  source 1..21: mol_type = other DNA
tgatggactcacccgttatta

SEQ ID NO: 6327 - DNA, 21 bp, synthetic construct
  misc_feature 1..21: note = Synthetic construct
  source 1..21: mol_type = other DNA
gatggactcacccgttattac

SEQ ID NO: 6328 - DNA, 21 bp, synthetic construct
  misc_feature 1..21: note = Synthetic construct
  source 1..21: mol_type = other DNA
atggactcacccgttattacg

SEQ ID NO: 6329 - DNA, 21 bp, synthetic construct
  misc_feature 1..21: note = Synthetic construct
  source 1..21: mol_type = other DNA
tggactcacccgttattacgt

SEQ ID NO: 6330 - DNA, 21 bp, synthetic construct
  misc_feature 1..21: note = Synthetic construct
  source 1..21: mol_type = other DNA
ggactcacccgttattacgtc

SEQ ID NO: 6331 - DNA, 21 bp, synthetic construct
  misc_feature 1..21: note = Synthetic construct
  source 1..21: mol_type = other DNA
gactcacccgttattacgtca

SEQ ID NO: 6332 - DNA, 21 bp, synthetic construct
  misc_feature 1..21: note = Synthetic construct
  source 1..21: mol_type = other DNA
actcacccgttattacgtcag

SEQ ID NO: 6333 - DNA, 21 bp, synthetic construct
  misc_feature 1..21: note = Synthetic construct
  source 1..21: mol_type = other DNA
ctcacccgttattacgtcagt

SEQ ID NO: 6334 - DNA, 21 bp, synthetic construct
  misc_feature 1..21: note = Synthetic construct
  source 1..21: mol_type = other DNA
tcacccgttattacgtcagta

SEQ ID NO: 6335 - DNA, 21 bp, synthetic construct
  misc_feature 1..21: note = Synthetic construct
  source 1..21: mol_type = other DNA
cacccgttattacgtcagtaa

SEQ ID NO: 6336 - DNA, 21 bp, synthetic construct
  misc_feature 1..21: note = Synthetic construct
  source 1..21: mol_type = other DNA
acccgttattacgtcagtaac

SEQ ID NO: 6337 - DNA, 21 bp, synthetic construct
  misc_feature 1..21: note = Synthetic construct
  source 1..21: mol_type = other DNA
cccgttattacgtcagtaact

SEQ ID NO: 6338 - DNA, 21 bp, synthetic construct
  misc_feature 1..21: note = Synthetic construct
  source 1..21: mol_type = other DNA
ccgttattacgtcagtaactg

SEQ ID NO: 6339 - DNA, 21 bp, synthetic construct
  misc_feature 1..21: note = Synthetic construct
  source 1..21: mol_type = other DNA
cgttattacgtcagtaactgt

SEQ ID NO: 6340 - DNA, 21 bp, synthetic construct
  misc_feature 1..21: note = Synthetic construct
  source 1..21: mol_type = other DNA
gttattacgtcagtaactgtt

SEQ ID NO: 6341 - DNA, 21 bp, synthetic construct
  misc_feature 1..21: note = Synthetic construct
  source 1..21: mol_type = other DNA
ttattacgtcagtaactgttc

SEQ ID NO: 6342 - DNA, 21 bp, synthetic construct
  misc_feature 1..21: note = Synthetic construct
  source 1..21: mol_type = other DNA
tattacgtcagtaactgttcc

SEQ ID NO: 6343 - DNA, 21 bp, synthetic construct
  misc_feature 1..21: note = Synthetic construct
  source 1..21: mol_type = other DNA
attacgtcagtaactgttcct

SEQ ID NO: 6344 - DNA, 21 bp, synthetic construct
  misc_feature 1..21: note = Synthetic construct
  source 1..21: mol_type = other DNA
ttacgtcagtaactgttcctg

SEQ ID NO: 6345 - DNA, 21 bp, synthetic construct
  misc_feature 1..21: note = Synthetic construct
  source 1..21: mol_type = other DNA
tacgtcagtaactgttcctga

SEQ ID NO: 6346 - DNA, 21 bp, synthetic construct
  misc_feature 1..21: note = Synthetic construct
  source 1..21: mol_type = other DNA
acgtcagtaactgttcctgac

SEQ ID NO: 6347 - DNA, 21 bp, synthetic construct
  misc_feature 1..21: note = Synthetic construct
  source 1..21: mol_type = other DNA
cgtcagtaactgttcctgaca

SEQ ID NO: 6348 - DNA, 21 bp, synthetic construct
  misc_feature 1..21: note = Synthetic construct
  source 1..21: mol_type = other DNA
gtcagtaactgttcctgacat

SEQ ID NO: 6349 - DNA, 21 bp, synthetic construct
  misc_feature 1..21: note = Synthetic construct
  source 1..21: mol_type = other DNA
tcagtaactgttcctgacatg

SEQ ID NO: 6350 - DNA, 21 bp, synthetic construct
  misc_feature 1..21: note = Synthetic construct
  source 1..21: mol_type = other DNA
cagtaactgttcctgacatgt

SEQ ID NO: 6351 - DNA, 21 bp, synthetic construct
  misc_feature 1..21: note = Synthetic construct
  source 1..21: mol_type = other DNA
agtaactgttcctgacatgta

SEQ ID NO: 6352 - DNA, 21 bp, synthetic construct
  misc_feature 1..21: note = Synthetic construct
  source 1..21: mol_type = other DNA
gtaactgttcctgacatgtag

SEQ ID NO: 6353 - DNA, 21 bp, synthetic construct
  misc_feature 1..21: note = Synthetic construct
  source 1..21: mol_type = other DNA
taactgttcctgacatgtagg

SEQ ID NO: 6354 - DNA, 21 bp, synthetic construct
  misc_feature 1..21: note = Synthetic construct
  source 1..21: mol_type = other DNA
aactgttcctgacatgtagga

SEQ ID NO: 6355 - DNA, 21 bp, synthetic construct
  misc_feature 1..21: note = Synthetic construct
  source 1..21: mol_type = other DNA
actgttcctgacatgtaggag

SEQ ID NO: 6356 - DNA, 21 bp, synthetic construct
  misc_feature 1..21: note = Synthetic construct
  source 1..21: mol_type = other DNA
ctgttcctgacatgtaggagc

SEQ ID NO: 6357 - DNA, 21 bp, synthetic construct
  misc_feature 1..21: note = Synthetic construct
  source 1..21: mol_type = other DNA
tgttcctgacatgtaggagca

SEQ ID NO: 6358 - DNA, 21 bp, synthetic construct
  misc_feature 1..21: note = Synthetic construct
  source 1..21: mol_type = other DNA
gttcctgacatgtaggagcat

SEQ ID NO: 6359 - DNA, 21 bp, synthetic construct
  misc_feature 1..21: note = Synthetic construct
  source 1..21: mol_type = other DNA
ttcctgacatgtaggagcatc

SEQ ID NO: 6360 - DNA, 21 bp, synthetic construct
  misc_feature 1..21: note = Synthetic construct
  source 1..21: mol_type = other DNA
tcctgacatgtaggagcatcc

SEQ ID NO: 6361 - DNA, 21 bp, synthetic construct
  misc_feature 1..21: note = Synthetic construct
  source 1..21: mol_type = other DNA
cctgacatgtaggagcatccc

SEQ ID NO: 6362 - DNA, 21 bp, synthetic construct
  misc_feature 1..21: note = Synthetic construct
  source 1..21: mol_type = other DNA
ctgacatgtaggagcatccca

SEQ ID NO: 6363 - DNA, 21 bp, synthetic construct
  misc_feature 1..21: note = Synthetic construct
  source 1..21: mol_type = other DNA
tgacatgtaggagcatcccac

SEQ ID NO: 6364 - DNA, 21 bp, synthetic construct
  misc_feature 1..21: note = Synthetic construct
  source 1..21: mol_type = other DNA
gacatgtaggagcatcccacg

SEQ ID NO: 6365 - DNA, 21 bp, synthetic construct
  misc_feature 1..21: note = Synthetic construct
  source 1..21: mol_type = other DNA
acatgtaggagcatcccacgg

SEQ ID NO: 6366 - DNA, 21 bp, synthetic construct
  misc_feature 1..21: note = Synthetic construct
  source 1..21: mol_type = other DNA
catgtaggagcatcccacggg

SEQ ID NO: 6367 - DNA, 21 bp, synthetic construct
  misc_feature 1..21: note = Synthetic construct
  source 1..21: mol_type = other DNA
atgtaggagcatcccacgggg

SEQ ID NO: 6368 - DNA, 21 bp, synthetic construct
  misc_feature 1..21: note = Synthetic construct
  source 1..21: mol_type = other DNA
tgtaggagcatcccacggggg

SEQ ID NO: 6369 - DNA, 21 bp, synthetic construct
  misc_feature 1..21: note = Synthetic construct
  source 1..21: mol_type = other DNA
gtaggagcatcccacgggggc

SEQ ID NO: 6370 - DNA, 21 bp, synthetic construct
  misc_feature 1..21: note = Synthetic construct
  source 1..21: mol_type = other DNA
taggagcatcccacgggggcc

SEQ ID NO: 6371 - DNA, 21 bp, synthetic construct
  misc_feature 1..21: note = Synthetic construct
  source 1..21: mol_type = other DNA
aggagcatcccacgggggccg

SEQ ID NO: 6372 - DNA, 21 bp, synthetic construct
  misc_feature 1..21: note = Synthetic construct
  source 1..21: mol_type = other DNA
ggagcatcccacgggggccgt

SEQ ID NO: 6373 - DNA, 21 bp, synthetic construct
  misc_feature 1..21: note = Synthetic construct
  source 1..21: mol_type = other DNA
gagcatcccacgggggccgta

SEQ ID NO: 6374 - DNA, 21 bp, synthetic construct
  misc_feature 1..21: note = Synthetic construct
  source 1..21: mol_type = other DNA
agcatcccacgggggccgtaa

SEQ ID NO: 6375 - DNA, 21 bp, synthetic construct
  misc_feature 1..21: note = Synthetic construct
  source 1..21: mol_type = other DNA
gcatcccacgggggccgtaag

SEQ ID NO: 6376 - DNA, 21 bp, synthetic construct
  misc_feature 1..21: note = Synthetic construct
  source 1..21: mol_type = other DNA
catcccacgggggccgtaagg

SEQ ID NO: 6377 - DNA, 21 bp, synthetic construct
  misc_feature 1..21: note = Synthetic construct
  source 1..21: mol_type = other DNA
atcccacgggggccgtaaggc

SEQ ID NO: 6378 - DNA, 21 bp, synthetic construct
  misc_feature 1..21: note = Synthetic construct
  source 1..21: mol_type = other DNA
tcccacgggggccgtaaggcc

SEQ ID NO: 6379 - DNA, 21 bp, synthetic construct
  misc_feature 1..21: note = Synthetic construct
  source 1..21: mol_type = other DNA
cccacgggggccgtaaggccc

SEQ ID NO: 6380 - DNA, 21 bp, synthetic construct
  misc_feature 1..21: note = Synthetic construct
  source 1..21: mol_type = other DNA
ccacgggggccgtaaggccct

SEQ ID NO: 6381 - DNA, 21 bp, synthetic construct
  misc_feature 1..21: note = Synthetic construct
  source 1..21: mol_type = other DNA
cacgggggccgtaaggccctc

SEQ ID NO: 6382 - DNA, 21 bp, synthetic construct
  misc_feature 1..21: note = Synthetic construct
  source 1..21: mol_type = other DNA
acgggggccgtaaggccctcg

SEQ ID NO: 6383 - DNA, 21 bp, synthetic construct
  misc_feature 1..21: note = Synthetic construct
  source 1..21: mol_type = other DNA
cgggggccgtaaggccctcga

SEQ ID NO: 6384 - DNA, 21 bp, synthetic construct
  misc_feature 1..21: note = Synthetic construct
  source 1..21: mol_type = other DNA
gggggccgtaaggccctcgag

SEQ ID NO: 6385 - DNA, 21 bp, synthetic construct
  misc_feature 1..21: note = Synthetic construct
  source 1..21: mol_type = other DNA
ggggccgtaaggccctcgagc

SEQ ID NO: 6386 - DNA, 21 bp, synthetic construct
  misc_feature 1..21: note = Synthetic construct
  source 1..21: mol_type = other DNA
gggccgtaaggccctcgagca

SEQ ID NO: 6387 - DNA, 21 bp, synthetic construct
  misc_feature 1..21: note = Synthetic construct
  source 1..21: mol_type = other DNA
ggccgtaaggccctcgagcat

SEQ ID NO: 6388 - DNA, 21 bp, synthetic construct
  misc_feature 1..21: note = Synthetic construct
  source 1..21: mol_type = other DNA
gccgtaaggccctcgagcatg

SEQ ID NO: 6389 - DNA, 21 bp, synthetic construct
  misc_feature 1..21: note = Synthetic construct
  source 1..21: mol_type = other DNA
ccgtaaggccctcgagcatgt

SEQ ID NO: 6390 - DNA, 21 bp, synthetic construct
  misc_feature 1..21: note = Synthetic construct
  source 1..21: mol_type = other DNA
cgtaaggccctcgagcatgtt

SEQ ID NO: 6391 - DNA, 21 bp, synthetic construct
  misc_feature 1..21: note = Synthetic construct
  source 1..21: mol_type = other DNA
gtaaggccctcgagcatgtta

SEQ ID NO: 6392 - DNA, 21 bp, synthetic construct
  misc_feature 1..21: note = Synthetic construct
  source 1..21: mol_type = other DNA
taaggccctcgagcatgttac

SEQ ID NO: 6393 - DNA, 21 bp, synthetic construct
  misc_feature 1..21: note = Synthetic construct
  source 1..21: mol_type = other DNA
aaggccctcgagcatgttacc

SEQ ID NO: 6394 - DNA, 21 bp, synthetic construct
  misc_feature 1..21: note = Synthetic construct
  source 1..21: mol_type = other DNA
aggccctcgagcatgttacct

SEQ ID NO: 6395 - DNA, 21 bp, synthetic construct
  misc_feature 1..21: note = Synthetic construct
  source 1..21: mol_type = other DNA
ggccctcgagcatgttaccta

SEQ ID NO: 6396 - DNA, 21 bp, synthetic construct
  misc_feature 1..21: note = Synthetic construct
  source 1..21: mol_type = other DNA
gccctcgagcatgttacctac

SEQ ID NO: 6397 - DNA, 21 bp, synthetic construct
  misc_feature 1..21: note = Synthetic construct
  source 1..21: mol_type = other DNA
ccctcgagcatgttacctaca

SEQ ID NO: 6398 - DNA, 21 bp, synthetic construct
  misc_feature 1..21: note = Synthetic construct
  source 1..21: mol_type = other DNA
cctcgagcatgttacctacag

SEQ ID NO: 6399 - DNA, 21 bp, synthetic construct
  misc_feature 1..21: note = Synthetic construct
  source 1..21: mol_type = other DNA
ctcgagcatgttacctacagg

SEQ ID NO: 6400 - DNA, 21 bp, synthetic construct
  misc_feature 1..21: note = Synthetic construct
  source 1..21: mol_type = other DNA
tcgagcatgttacctacaggt

SEQ ID NO: 6401 - DNA, 21 bp, synthetic construct
  misc_feature 1..21: note = Synthetic construct
  source 1..21: mol_type = other DNA
cgagcatgttacctacaggta

SEQ ID NO: 6402 - DNA, 21 bp, synthetic construct
  misc_feature 1..21: note = Synthetic construct
  source 1..21: mol_type = other DNA
gagcatgttacctacaggtag

SEQ ID NO: 6403 - DNA, 21 bp, synthetic construct
  misc_feature 1..21: note = Synthetic construct
  source 1..21: mol_type = other DNA
agcatgttacctacaggtagg

SEQ ID NO: 6404 - DNA, 21 bp, synthetic construct
  misc_feature 1..21: note = Synthetic construct
  source 1..21: mol_type = other DNA
gcatgttacctacaggtagga

SEQ ID NO: 6405 - DNA, 21 bp, synthetic construct
  misc_feature 1..21: note = Synthetic construct
  source 1..21: mol_type = other DNA
catgttacctacaggtaggag

SEQ ID NO: 6406 - DNA, 21 bp, synthetic construct
  misc_feature 1..21: note = Synthetic construct
  source 1..21: mol_type = other DNA
atgttacctacaggtaggagc

SEQ ID NO: 6407 - DNA, 21 bp, synthetic construct
  misc_feature 1..21: note = Synthetic construct
  source 1..21: mol_type = other DNA
tgttacctacaggtaggagcc

SEQ ID NO: 6408 - DNA, 21 bp, synthetic construct
  misc_feature 1..21: note = Synthetic construct
  source 1..21: mol_type = other DNA
gttacctacaggtaggagcca

SEQ ID NO: 6409 - DNA, 21 bp, synthetic construct
  misc_feature 1..21: note = Synthetic construct
  source 1..21: mol_type = other DNA
ttacctacaggtaggagccag

SEQ ID NO: 6410 - DNA, 21 bp, synthetic construct
  misc_feature 1..21: note = Synthetic construct
  source 1..21: mol_type = other DNA
tacctacaggtaggagccagt

SEQ ID NO: 6411 - DNA, 21 bp, synthetic construct
  misc_feature 1..21: note = Synthetic construct
  source 1..21: mol_type = other DNA
acctacaggtaggagccagtc

SEQ ID NO: 6412 - DNA, 21 bp, synthetic construct
  misc_feature 1..21: note = Synthetic construct
  source 1..21: mol_type = other DNA
cctacaggtaggagccagtcg

SEQ ID NO: 6413 - DNA, 21 bp, synthetic construct
  misc_feature 1..21: note = Synthetic construct
  source 1..21: mol_type = other DNA
ctacaggtaggagccagtcga

SEQ ID NO: 6414 - DNA, 21 bp, synthetic construct
  misc_feature 1..21: note = Synthetic construct
  source 1..21: mol_type = other DNA
tacaggtaggagccagtcgac

SEQ ID NO: 6415 - DNA, 21 bp, synthetic construct
  misc_feature 1..21: note = Synthetic construct
  source 1..21: mol_type = other DNA
acaggtaggagccagtcgaca

SEQ ID NO: 6416 - DNA, 21 bp, synthetic construct
  misc_feature 1..21: note = Synthetic construct
  source 1..21: mol_type = other DNA
caggtaggagccagtcgacaa

SEQ ID NO: 6417 - DNA, 21 bp, synthetic construct
  misc_feature 1..21: note = Synthetic construct
  source 1..21: mol_type = other DNA
aggtaggagccagtcgacaac

SEQ ID NO: 6418 - DNA, 21 bp, synthetic construct
  misc_feature 1..21: note = Synthetic construct
  source 1..21: mol_type = other DNA
ggtaggagccagtcgacaacg

SEQ ID NO: 6419 - DNA, 21 bp, synthetic construct
  misc_feature 1..21: note = Synthetic construct
  source 1..21: mol_type = other DNA
gtaggagccagtcgacaacga

SEQ ID NO: 6420 - DNA, 21 bp, synthetic construct
  misc_feature 1..21: note = Synthetic construct
  source 1..21: mol_type = other DNA
taggagccagtcgacaacgaa

SEQ ID NO: 6421 - DNA, 21 bp, synthetic construct
  misc_feature 1..21: note = Synthetic construct
  source 1..21: mol_type = other DNA
aggagccagtcgacaacgaat

SEQ ID NO: 6422 - DNA, 21 bp, synthetic construct
  misc_feature 1..21: note = Synthetic construct
  source 1..21: mol_type = other DNA
ggagccagtcgacaacgaatg

SEQ ID NO: 6423 - DNA, 21 bp, synthetic construct
  misc_feature 1..21: note = Synthetic construct
  source 1..21: mol_type = other DNA
gagccagtcgacaacgaatga

SEQ ID NO: 6424 - DNA, 21 bp, synthetic construct
  misc_feature 1..21: note = Synthetic construct
  source 1..21: mol_type = other DNA
agccagtcgacaacgaatgag

SEQ ID NO: 6425 - DNA, 21 bp, synthetic construct
  misc_feature 1..21: note = Synthetic construct
  source 1..21: mol_type = other DNA
gccagtcgacaacgaatgaga

SEQ ID NO: 6426 - DNA, 21 bp, synthetic construct
  misc_feature 1..21: note = Synthetic construct
  source 1..21: mol_type = other DNA
ccagtcgacaacgaatgagaa

SEQ ID NO: 6427 - DNA, 21 bp, synthetic construct
  misc_feature 1..21: note = Synthetic construct
  source 1..21: mol_type = other DNA
cagtcgacaacgaatgagaaa

SEQ ID NO: 6428 - DNA, 21 bp, synthetic construct
  misc_feature 1..21: note = Synthetic construct
  source 1..21: mol_type = other DNA
agtcgacaacgaatgagaaag

SEQ ID NO: 6429 - DNA, 21 bp, synthetic construct
  misc_feature 1..21: note = Synthetic construct
  source 1..21: mol_type = other DNA
gtcgacaacgaatgagaaagg

SEQ ID NO: 6430 - DNA, 21 bp, synthetic construct
  misc_feature 1..21: note = Synthetic construct
  source 1..21: mol_type = other DNA
tcgacaacgaatgagaaaggc

SEQ ID NO: 6431 - DNA, 21 bp, synthetic construct
  misc_feature 1..21: note = Synthetic construct
  source 1..21: mol_type = other DNA
cgacaacgaatgagaaaggca

SEQ ID NO: 6432 - DNA, 21 bp, synthetic construct
  misc_feature 1..21: note = Synthetic construct
  source 1..21: mol_type = other DNA
gacaacgaatgagaaaggcac

SEQ ID NO: 6433 - DNA, 21 bp, synthetic construct
  misc_feature 1..21: note = Synthetic construct
  source 1..21: mol_type = other DNA
acaacgaatgagaaaggcacc

SEQ ID NO: 6434 - DNA, 21 bp, synthetic construct
  misc_feature 1..21: note = Synthetic construct
  source 1..21: mol_type = other DNA
caacgaatgagaaaggcacct

SEQ ID NO: 6435 - DNA, 21 bp, synthetic construct
  misc_feature 1..21: note = Synthetic construct
  source 1..21: mol_type = other DNA
aacgaatgagaaaggcacctt

SEQ ID NO: 6436 - DNA, 21 bp, synthetic construct
  misc_feature 1..21: note = Synthetic construct
  source 1..21: mol_type = other DNA
acgaatgagaaaggcaccttt

SEQ ID NO: 6437 - DNA, 21 bp, synthetic construct
  misc_feature 1..21: note = Synthetic construct
  source 1..21: mol_type = other DNA
cgaatgagaaaggcacctttt

SEQ ID NO: 6438 - DNA, 21 bp, synthetic construct
  misc_feature 1..21: note = Synthetic construct
  source 1..21: mol_type = other DNA
gaatgagaaaggcaccttttc

SEQ ID NO: 6439 - DNA, 21 bp, synthetic construct
  misc_feature 1..21: note = Synthetic construct
  source 1..21: mol_type = other DNA
aatgagaaaggcaccttttcc

SEQ ID NO: 6440 - DNA, 21 bp, synthetic construct
  misc_feature 1..21: note = Synthetic construct
  source 1..21: mol_type = other DNA
atgagaaaggcaccttttccc

SEQ ID NO: 6441 - DNA, 21 bp, synthetic construct
  misc_feature 1..21: note = Synthetic construct
  source 1..21: mol_type = other DNA
tgagaaaggcaccttttccca

SEQ ID NO: 6442 - DNA, 21 bp, synthetic construct
  misc_feature 1..21: note = Synthetic construct
  source 1..21: mol_type = other DNA
gagaaaggcaccttttcccac

SEQ ID NO: 6443 - DNA, 21 bp, synthetic construct
  misc_feature 1..21: note = Synthetic construct
  source 1..21: mol_type = other DNA
agaaaggcaccttttcccaca

SEQ ID NO: 6444 - DNA, 21 bp, synthetic construct
  misc_feature 1..21: note = Synthetic construct
  source 1..21: mol_type = other DNA
gaaaggcaccttttcccacac

SEQ ID NO: 6445 - DNA, 21 bp, synthetic construct
  misc_feature 1..21: note = Synthetic construct
  source 1..21: mol_type = other DNA
aaaggcaccttttcccacact

SEQ ID NO: 6446 - DNA, 21 bp, synthetic construct
  misc_feature 1..21: note = Synthetic construct
  source 1..21: mol_type = other DNA
aaggcaccttttcccacacta

SEQ ID NO: 6447 - DNA, 21 bp, synthetic construct
  misc_feature 1..21: note = Synthetic construct
  source 1..21: mol_type = other DNA
aggcaccttttcccacactat

SEQ ID NO: 6448 - DNA, 21 bp, synthetic construct
  misc_feature 1..21: note = Synthetic construct
  source 1..21: mol_type = other DNA
ggcaccttttcccacactata

SEQ ID NO: 6449 - DNA, 21 bp, synthetic construct
  misc_feature 1..21: note = Synthetic construct
  source 1..21: mol_type = other DNA
gcaccttttcccacactatac

SEQ ID NO: 6450 - DNA, 21 bp, synthetic construct
  misc_feature 1..21: note = Synthetic construct
  source 1..21: mol_type = other DNA
caccttttcccacactatacc

SEQ ID NO: 6451 - DNA, 21 bp, synthetic construct
  misc_feature 1..21: note = Synthetic construct
  source 1..21: mol_type = other DNA
accttttcccacactatacct

SEQ ID NO: 6452 - DNA, 21 bp, synthetic construct
  misc_feature 1..21: note = Synthetic construct
  source 1..21: mol_type = other DNA
ccttttcccacactataccta

SEQ ID NO: 6453 - DNA, 21 bp, synthetic construct
  misc_feature 1..21: note = Synthetic construct
  source 1..21: mol_type = other DNA
cttttcccacactatacctag

SEQ ID NO: 6454 - DNA, 21 bp, synthetic construct
  misc_feature 1..21: note = Synthetic construct
  source 1..21: mol_type = other DNA
ttttcccacactatacctagt

SEQ ID NO: 6455 - DNA, 21 bp, synthetic construct
  misc_feature 1..21: note = Synthetic construct
  source 1..21: mol_type = other DNA
tttcccacactatacctagtg

SEQ ID NO: 6456 - DNA, 21 bp, synthetic construct
  misc_feature 1..21: note = Synthetic construct
  source 1..21: mol_type = other DNA
ttcccacactatacctagtgg

SEQ ID NO: 6457 - DNA, 21 bp, synthetic construct
  misc_feature 1..21: note = Synthetic construct
  source 1..21: mol_type = other DNA
tcccacactatacctagtggg

SEQ ID NO: 6458 - DNA, 21 bp, synthetic construct
  misc_feature 1..21: note = Synthetic construct
  source 1..21: mol_type = other DNA
cccacactatacctagtgggt

SEQ ID NO: 6459 - DNA, 21 bp, synthetic construct
  misc_feature 1..21: note = Synthetic construct
  source 1..21: mol_type = other DNA
ccacactatacctagtgggtt

SEQ ID NO: 6460 - DNA, 21 bp, synthetic construct
  misc_feature 1..21: note = Synthetic construct
  source 1..21: mol_type = other DNA
cacactatacctagtgggttc

SEQ ID NO: 6461 - DNA, 21 bp, synthetic construct
  misc_feature 1..21: note = Synthetic construct
  source 1..21: mol_type = other DNA
acactatacctagtgggttca

SEQ ID NO: 6462 - DNA, 21 bp, synthetic construct
  misc_feature 1..21: note = Synthetic construct
  source 1..21: mol_type = other DNA
cactatacctagtgggttcaa

SEQ ID NO: 6463 - DNA, 21 bp, synthetic construct
  misc_feature 1..21: note = Synthetic construct
  source 1..21: mol_type = other DNA
actatacctagtgggttcaag

SEQ ID NO: 6464 - DNA, 21 bp, synthetic construct
  misc_feature 1..21: note = Synthetic construct
  source 1..21: mol_type = other DNA
ctatacctagtgggttcaaga

SEQ ID NO: 6465 - DNA, 21 bp, synthetic construct
  misc_feature 1..21: note = Synthetic construct
  source 1..21: mol_type = other DNA
tatacctagtgggttcaagat

SEQ ID NO: 6466 - DNA, 21 bp, synthetic construct
  misc_feature 1..21: note = Synthetic construct
  source 1..21: mol_type = other DNA
atacctagtgggttcaagata

SEQ ID NO: 6467 - DNA, 21 bp, synthetic construct
  misc_feature 1..21: note = Synthetic construct
  source 1..21: mol_type = other DNA
tacctagtgggttcaagatac

SEQ ID NO: 6468 - DNA, 21 bp, synthetic construct
  misc_feature 1..21: note = Synthetic construct
  source 1..21: mol_type = other DNA
acctagtgggttcaagatacc

SEQ ID NO: 6469 - DNA, 21 bp, synthetic construct
  misc_feature 1..21: note = Synthetic construct
  source 1..21: mol_type = other DNA
cctagtgggttcaagatacct

SEQ ID NO: 6470 - DNA, 21 bp, synthetic construct
  misc_feature 1..21: note = Synthetic construct
  source 1..21: mol_type = other DNA
ctagtgggttcaagataccta

SEQ ID NO: 6471 - DNA, 21 bp, synthetic construct
  misc_feature 1..21: note = Synthetic construct
  source 1..21: mol_type = other DNA
tagtgggttcaagatacctag

SEQ ID NO: 6472 - DNA, 21 bp, synthetic construct
  misc_feature 1..21: note = Synthetic construct
  source 1..21: mol_type = other DNA
agtgggttcaagatacctaga

SEQ ID NO: 6473 - DNA, 21 bp, synthetic construct
  misc_feature 1..21: note = Synthetic construct
  source 1..21: mol_type = other DNA
gtgggttcaagatacctagag

SEQ ID NO: 6474 - DNA, 21 bp, synthetic construct
  misc_feature 1..21: note = Synthetic construct
  source 1..21: mol_type = other DNA
tgggttcaagatacctagaga

SEQ ID NO: 6475 - DNA, 21 bp, synthetic construct
  misc_feature 1..21: note = Synthetic construct
  source 1..21: mol_type = other DNA
gggttcaagatacctagagac

SEQ ID NO: 6476 - DNA, 21 bp, synthetic construct
  misc_feature 1..21: note = Synthetic construct
  source 1..21: mol_type = other DNA
ggttcaagatacctagagacg

SEQ ID NO: 6477 - DNA, 21 bp, synthetic construct
  misc_feature 1..21: note = Synthetic construct
  source 1..21: mol_type = other DNA
gttcaagatacctagagacga

SEQ ID NO: 6478 - DNA, 21 bp, synthetic construct
  misc_feature 1..21: note = Synthetic construct
  source 1..21: mol_type = other DNA
ttcaagatacctagagacgac

SEQ ID NO: 6479 - DNA, 21 bp, synthetic construct
  misc_feature 1..21: note = Synthetic construct
  source 1..21: mol_type = other DNA
tcaagatacctagagacgaca

SEQ ID NO: 6480 - DNA, 21 bp, synthetic construct
  misc_feature 1..21: note = Synthetic construct
  source 1..21: mol_type = other DNA
caagatacctagagacgacaa

SEQ ID NO: 6481 - DNA, 21 bp, synthetic construct
  misc_feature 1..21: note = Synthetic construct
  source 1..21: mol_type = other DNA
aagatacctagagacgacaac

SEQ ID NO: 6482 - DNA, 21 bp, synthetic construct
  misc_feature 1..21: note = Synthetic construct
  source 1..21: mol_type = other DNA
agatacctagagacgacaacc

SEQ ID NO: 6483 - DNA, 21 bp, synthetic construct
  misc_feature 1..21: note = Synthetic construct
  source 1..21: mol_type = other DNA
gatacctagagacgacaacca

SEQ ID NO: 6484 - DNA, 21 bp, synthetic construct
  misc_feature 1..21: note = Synthetic construct
  source 1..21: mol_type = other DNA
atacctagagacgacaaccat

SEQ ID NO: 6485 - DNA, 21 bp, synthetic construct
  misc_feature 1..21: note = Synthetic construct
  source 1..21: mol_type = other DNA
tacctagagacgacaaccatg

SEQ ID NO: 6486 - DNA, 21 bp, synthetic construct
  misc_feature 1..21: note = Synthetic construct
  source 1..21: mol_type = other DNA
acctagagacgacaaccatgc

SEQ ID NO: 6487 - DNA, 21 bp, synthetic construct
  misc_feature 1..21: note = Synthetic construct
  source 1..21: mol_type = other DNA
cctagagacgacaaccatgcc

SEQ ID NO: 6488 - DNA, 21 bp, synthetic construct
  misc_feature 1..21: note = Synthetic construct
  source 1..21: mol_type = other DNA
ctagagacgacaaccatgcca

SEQ ID NO: 6489 - DNA, 21 bp, synthetic construct
  misc_feature 1..21: note = Synthetic construct
  source 1..21: mol_type = other DNA
tagagacgacaaccatgccaa

SEQ ID NO: 6490 - DNA, 21 bp, synthetic construct
  misc_feature 1..21: note = Synthetic construct
  source 1..21: mol_type = other DNA
agagacgacaaccatgccaaa

SEQ ID NO: 6491 - DNA, 21 bp, synthetic construct
  misc_feature 1..21: note = Synthetic construct
  source 1..21: mol_type = other DNA
gagacgacaaccatgccaaac

SEQ ID NO: 6492 - DNA, 21 bp, synthetic construct
  misc_feature 1..21: note = Synthetic construct
  source 1..21: mol_type = other DNA
agacgacaaccatgccaaacg

SEQ ID NO: 6493 - DNA, 21 bp, synthetic construct
  misc_feature 1..21: note = Synthetic construct
  source 1..21: mol_type = other DNA
gacgacaaccatgccaaacgt

SEQ ID NO: 6494 - DNA, 21 bp, synthetic construct
  misc_feature 1..21: note = Synthetic construct
  source 1..21: mol_type = other DNA
acgacaaccatgccaaacgtg

SEQ ID NO: 6495 - DNA, 21 bp, synthetic construct
  misc_feature 1..21: note = Synthetic construct
  source 1..21: mol_type = other DNA
cgacaaccatgccaaacgtgc

SEQ ID NO: 6496 - DNA, 21 bp, synthetic construct
  misc_feature 1..21: note = Synthetic construct
  source 1..21: mol_type = other DNA
gacaaccatgccaaacgtgca

SEQ ID NO: 6497 - DNA, 21 bp, synthetic construct
  misc_feature 1..21: note = Synthetic construct
  source 1..21: mol_type = other DNA
acaaccatgccaaacgtgcat

SEQ ID NO: 6498 - DNA, 21 bp, synthetic construct
  misc_feature 1..21: note = Synthetic construct
  source 1..21: mol_type = other DNA
caaccatgccaaacgtgcatc

SEQ ID NO: 6499 - DNA, 21 bp, synthetic construct
  misc_feature 1..21: note = Synthetic construct
  source 1..21: mol_type = other DNA
aaccatgccaaacgtgcatcg

SEQ ID NO: 6500 - DNA, 21 bp, synthetic construct
  misc_feature 1..21: note = Synthetic construct
  source 1..21: mol_type = other DNA
accatgccaaacgtgcatcgt

SEQ ID NO: 6501 - DNA, 21 bp, synthetic construct
  misc_feature 1..21: note = Synthetic construct
  source 1..21: mol_type = other DNA
ccatgccaaacgtgcatcgtt

SEQ ID NO: 6502 - DNA, 21 bp, synthetic construct
  misc_feature 1..21: note = Synthetic construct
  source 1..21: mol_type = other DNA
catgccaaacgtgcatcgttt

SEQ ID NO: 6503 - DNA, 21 bp, synthetic construct
  misc_feature 1..21: note = Synthetic construct
  source 1..21: mol_type = other DNA
atgccaaacgtgcatcgttta

SEQ ID NO: 6504 - DNA, 21 bp, synthetic construct
  misc_feature 1..21: note = Synthetic construct
  source 1..21: mol_type = other DNA
tgccaaacgtgcatcgtttat

SEQ ID NO: 6505 - DNA, 21 bp, synthetic construct
  misc_feature 1..21: note = Synthetic construct
  source 1..21: mol_type = other DNA
gccaaacgtgcatcgtttatg

SEQ ID NO: 6506 - DNA, 21 bp, synthetic construct
  misc_feature 1..21: note = Synthetic construct
  source 1..21: mol_type = other DNA
ccaaacgtgcatcgtttatgt

SEQ ID NO: 6507 - DNA, 21 bp, synthetic construct
  misc_feature 1..21: note = Synthetic construct
  source 1..21: mol_type = other DNA
caaacgtgcatcgtttatgta

SEQ ID NO: 6508 - DNA, 21 bp, synthetic construct
  misc_feature 1..21: note = Synthetic construct
  source 1..21: mol_type = other DNA
aaacgtgcatcgtttatgtaa

SEQ ID NO: 6509 - DNA, 21 bp, synthetic construct
  misc_feature 1..21: note = Synthetic construct
  source 1..21: mol_type = other DNA
aacgtgcatcgtttatgtaaa

SEQ ID NO: 6510 - DNA, 21 bp, synthetic construct
  misc_feature 1..21: note = Synthetic construct
  source 1..21: mol_type = other DNA
acgtgcatcgtttatgtaaaa

SEQ ID NO: 6511 - DNA, 21 bp, synthetic construct
  misc_feature 1..21: note = Synthetic construct
  source 1..21: mol_type = other DNA
cgtgcatcgtttatgtaaaac

SEQ ID NO: 6512 - DNA, 21 bp, synthetic construct
  misc_feature 1..21: note = Synthetic construct
  source 1..21: mol_type = other DNA
gtgcatcgtttatgtaaaacc

SEQ ID NO: 6513 - DNA, 21 bp, synthetic construct
  misc_feature 1..21: note = Synthetic construct
  source 1..21: mol_type = other DNA
tgcatcgtttatgtaaaacca

SEQ ID NO: 6514 - DNA, 21 bp, synthetic construct
  misc_feature 1..21: note = Synthetic construct
  source 1..21: mol_type = other DNA
gcatcgtttatgtaaaaccat

SEQ ID NO: 6515 - DNA, 21 bp, synthetic construct
  misc_feature 1..21: note = Synthetic construct
  source 1..21: mol_type = other DNA
catcgtttatgtaaaaccata

SEQ ID NO: 6516 - DNA, 21 bp, synthetic construct
  misc_feature 1..21: note = Synthetic construct
  source 1..21: mol_type = other DNA
atcgtttatgtaaaaccatat

SEQ ID NO: 6517 - DNA, 21 bp, synthetic construct
  misc_feature 1..21: note = Synthetic construct
  source 1..21: mol_type = other DNA
tcgtttatgtaaaaccatatc

SEQ ID NO: 6518 - DNA, 21 bp, synthetic construct
  misc_feature 1..21: note = Synthetic construct
  source 1..21: mol_type = other DNA
cgtttatgtaaaaccatatca

SEQ ID NO: 6519 - DNA, 21 bp, synthetic construct
  misc_feature 1..21: note = Synthetic construct
  source 1..21: mol_type = other DNA
gtttatgtaaaaccatatcac

SEQ ID NO: 6520 - DNA, 21 bp, synthetic construct
  misc_feature 1..21: note = Synthetic construct
  source 1..21: mol_type = other DNA
tttatgtaaaaccatatcacg

SEQ ID NO: 6521 - DNA, 21 bp, synthetic construct
  misc_feature 1..21: note = Synthetic construct
  source 1..21: mol_type = other DNA
ttatgtaaaaccatatcacga

SEQ ID NO: 6522 - DNA, 21 bp, synthetic construct
  misc_feature 1..21: note = Synthetic construct
  source 1..21: mol_type = other DNA
tatgtaaaaccatatcacgat

SEQ ID NO: 6523 - DNA, 21 bp, synthetic construct
  misc_feature 1..21: note = Synthetic construct
  source 1..21: mol_type = other DNA
atgtaaaaccatatcacgata

SEQ ID NO: 6524 - DNA, 21 bp, synthetic construct
  misc_feature 1..21: note = Synthetic construct
  source 1..21: mol_type = other DNA
tgtaaaaccatatcacgatac

SEQ ID NO: 6525 - DNA, 21 bp, synthetic construct
  misc_feature 1..21: note = Synthetic construct
  source 1..21: mol_type = other DNA
gtaaaaccatatcacgatacg

SEQ ID NO: 6526 - DNA, 21 bp, synthetic construct
  misc_feature 1..21: note = Synthetic construct
  source 1..21: mol_type = other DNA
taaaaccatatcacgatacgt

SEQ ID NO: 6527 - DNA, 21 bp, synthetic construct
  misc_feature 1..21: note = Synthetic construct
  source 1..21: mol_type = other DNA
aaaaccatatcacgatacgtc

SEQ ID NO: 6528 - DNA, 21 bp, synthetic construct
  misc_feature 1..21: note = Synthetic construct
  source 1..21: mol_type = other DNA
aaaccatatcacgatacgtcg

SEQ ID NO: 6529 - DNA, 21 bp, synthetic construct
  misc_feature 1..21: note = Synthetic construct
  source 1..21: mol_type = other DNA
aaccatatcacgatacgtcgc

SEQ ID NO: 6530 - DNA, 21 bp, synthetic construct
  misc_feature 1..21: note = Synthetic construct
  source 1..21: mol_type = other DNA
accatatcacgatacgtcgcg

SEQ ID NO: 6531 - DNA, 21 bp, synthetic construct
  misc_feature 1..21: note = Synthetic construct
  source 1..21: mol_type = other DNA
ccatatcacgatacgtcgcga

SEQ ID NO: 6532 - DNA, 21 bp, synthetic construct
  misc_feature 1..21: note = Synthetic construct
  source 1..21: mol_type = other DNA
catatcacgatacgtcgcgat

SEQ ID NO: 6533 - DNA, 21 bp, synthetic construct
  misc_feature 1..21: note = Synthetic construct
  source 1..21: mol_type = other DNA
atatcacgatacgtcgcgata

SEQ ID NO: 6534 - DNA, 21 bp, synthetic construct
  misc_feature 1..21: note = Synthetic construct
  source 1..21: mol_type = other DNA
tatcacgatacgtcgcgatat

SEQ ID NO: 6535 - DNA, 21 bp, synthetic construct
  misc_feature 1..21: note = Synthetic construct
  source 1..21: mol_type = other DNA
atcacgatacgtcgcgatatg

SEQ ID NO: 6536 - DNA, 21 bp, synthetic construct
  misc_feature 1..21: note = Synthetic construct
  source 1..21: mol_type = other DNA
tcacgatacgtcgcgatatgt

SEQ ID NO: 6537 - DNA, 21 bp, synthetic construct
  misc_feature 1..21: note = Synthetic construct
  source 1..21: mol_type = other DNA
cacgatacgtcgcgatatgtt

SEQ ID NO: 6538 - DNA, 21 bp, synthetic construct
  misc_feature 1..21: note = Synthetic construct
  source 1..21: mol_type = other DNA
acgatacgtcgcgatatgttg

SEQ ID NO: 6539 - DNA, 21 bp, synthetic construct
  misc_feature 1..21: note = Synthetic construct
  source 1..21: mol_type = other DNA
cgatacgtcgcgatatgttgc

SEQ ID NO: 6540 - DNA, 21 bp, synthetic construct
  misc_feature 1..21: note = Synthetic construct
  source 1..21: mol_type = other DNA
gatacgtcgcgatatgttgca

SEQ ID NO: 6541 - DNA, 21 bp, synthetic construct
  misc_feature 1..21: note = Synthetic construct
  source 1..21: mol_type = other DNA
atacgtcgcgatatgttgcac

SEQ ID NO: 6542 - DNA, 21 bp, synthetic construct
  misc_feature 1..21: note = Synthetic construct
  source 1..21: mol_type = other DNA
tacgtcgcgatatgttgcacg

SEQ ID NO: 6543 - DNA, 21 bp, synthetic construct
  misc_feature 1..21: note = Synthetic construct
  source 1..21: mol_type = other DNA
acgtcgcgatatgttgcacgt

SEQ ID NO: 6544 - DNA, 21 bp, synthetic construct
  misc_feature 1..21: note = Synthetic construct
  source 1..21: mol_type = other DNA
cgtcgcgatatgttgcacgtt

SEQ ID NO: 6545 - DNA, 21 bp, synthetic construct
  misc_feature 1..21: note = Synthetic construct
  source 1..21: mol_type = other DNA
gtcgcgatatgttgcacgttg

SEQ ID NO: 6546 - DNA, 21 bp, synthetic construct
  misc_feature 1..21: note = Synthetic construct
  source 1..21: mol_type = other DNA
tcgcgatatgttgcacgttgt

SEQ ID NO: 6547 - DNA, 21 bp, synthetic construct
  misc_feature 1..21: note = Synthetic construct
  source 1..21: mol_type = other DNA
cgcgatatgttgcacgttgtc

SEQ ID NO: 6548 - DNA, 21 bp, synthetic construct
  misc_feature 1..21: note = Synthetic construct
  source 1..21: mol_type = other DNA
gcgatatgttgcacgttgtct

SEQ ID NO: 6549 - DNA, 21 bp, synthetic construct
  misc_feature 1..21: note = Synthetic construct
  source 1..21: mol_type = other DNA
cgatatgttgcacgttgtctg

SEQ ID NO: 6550 - DNA, 21 bp, synthetic construct
  misc_feature 1..21: note = Synthetic construct
  source 1..21: mol_type = other DNA
gatatgttgcacgttgtctgg

SEQ ID NO: 6551 - DNA, 21 bp, synthetic construct
  misc_feature 1..21: note = Synthetic construct
  source 1..21: mol_type = other DNA
atatgttgcacgttgtctgga

SEQ ID NO: 6552 - DNA, 21 bp, synthetic construct
  misc_feature 1..21: note = Synthetic construct
  source 1..21: mol_type = other DNA
tatgttgcacgttgtctggaa

SEQ ID NO: 6553 - DNA, 21 bp, synthetic construct
  misc_feature 1..21: note = Synthetic construct
  source 1..21: mol_type = other DNA
atgttgcacgttgtctggaag

SEQ ID NO: 6554 - DNA, 21 bp, synthetic construct
  misc_feature 1..21: note = Synthetic construct
  source 1..21: mol_type = other DNA
tgttgcacgttgtctggaagt

SEQ ID NO: 6555 - DNA, 21 bp, synthetic construct
  misc_feature 1..21: note = Synthetic construct
  source 1..21: mol_type = other DNA
gttgcacgttgtctggaagtt

SEQ ID NO: 6556 - DNA, 21 bp, synthetic construct
  misc_feature 1..21: note = Synthetic construct
  source 1..21: mol_type = other DNA
ttgcacgttgtctggaagttt

SEQ ID NO: 6557 - DNA, 21 bp, synthetic construct
  misc_feature 1..21: note = Synthetic construct
  source 1..21: mol_type = other DNA
tgcacgttgtctggaagtttg

SEQ ID NO: 6558 - DNA, 21 bp, synthetic construct
  misc_feature 1..21: note = Synthetic construct
  source 1..21: mol_type = other DNA
gcacgttgtctggaagtttgc

SEQ ID NO: 6559 - DNA, 21 bp, synthetic construct
  misc_feature 1..21: note = Synthetic construct
  source 1..21: mol_type = other DNA
cacgttgtctggaagtttgca

SEQ ID NO: 6560 - DNA, 21 bp, synthetic construct
  misc_feature 1..21: note = Synthetic construct
  source 1..21: mol_type = other DNA
acgttgtctggaagtttgcag

SEQ ID NO: 6561 - DNA, 21 bp, synthetic construct
  misc_feature 1..21: note = Synthetic construct
  source 1..21: mol_type = other DNA
cgttgtctggaagtttgcagc

SEQ ID NO: 6562 - DNA, 21 bp, synthetic construct
  misc_feature 1..21: note = Synthetic construct
  source 1..21: mol_type = other DNA
gttgtctggaagtttgcagct

SEQ ID NO: 6563 - DNA, 21 bp, synthetic construct
  misc_feature 1..21: note = Synthetic construct
  source 1..21: mol_type = other DNA
ttgtctggaagtttgcagctg

SEQ ID NO: 6564 - DNA, 21 bp, synthetic construct
  misc_feature 1..21: note = Synthetic construct
  source 1..21: mol_type = other DNA
tgtctggaagtttgcagctgg

SEQ ID NO: 6565 - DNA, 21 bp, synthetic construct
  misc_feature 1..21: note = Synthetic construct
  source 1..21: mol_type = other DNA
gtctggaagtttgcagctgga

SEQ ID NO: 6566 - DNA, 21 bp, synthetic construct
  misc_feature 1..21: note = Synthetic construct
  source 1..21: mol_type = other DNA
tctggaagtttgcagctggat

SEQ ID NO: 6567 - DNA, 21 bp, synthetic construct
  misc_feature 1..21: note = Synthetic construct
  source 1..21: mol_type = other DNA
ctggaagtttgcagctggata

SEQ ID NO: 6568 - DNA, 21 bp, synthetic construct
  misc_feature 1..21: note = Synthetic construct
  source 1..21: mol_type = other DNA
tggaagtttgcagctggatac

SEQ ID NO: 6569 - DNA, 21 bp, synthetic construct
  misc_feature 1..21: note = Synthetic construct
  source 1..21: mol_type = other DNA
ggaagtttgcagctggatacg

SEQ ID NO: 6570 - DNA, 21 bp, synthetic construct
  misc_feature 1..21: note = Synthetic construct
  source 1..21: mol_type = other DNA
gaagtttgcagctggatacga

SEQ ID NO: 6571 - DNA, 21 bp, synthetic construct
  misc_feature 1..21: note = Synthetic construct
  source 1..21: mol_type = other DNA
aagtttgcagctggatacgac

SEQ ID NO: 6572 - DNA, 21 bp, synthetic construct
  misc_feature 1..21: note = Synthetic construct
  source 1..21: mol_type = other DNA
agtttgcagctggatacgaca

SEQ ID NO: 6573 - DNA, 21 bp, synthetic construct
  misc_feature 1..21: note = Synthetic construct
  source 1..21: mol_type = other DNA
gtttgcagctggatacgacag

SEQ ID NO: 6574 - DNA, 21 bp, synthetic construct
  misc_feature 1..21: note = Synthetic construct
  source 1..21: mol_type = other DNA
tttgcagctggatacgacaga

SEQ ID NO: 6575 - DNA, 21 bp, synthetic construct
  misc_feature 1..21: note = Synthetic construct
  source 1..21: mol_type = other DNA
ttgcagctggatacgacagac

SEQ ID NO: 6576 - DNA, 21 bp, synthetic construct
  misc_feature 1..21: note = Synthetic construct
  source 1..21: mol_type = other DNA
tgcagctggatacgacagacg

SEQ ID NO: 6577 - DNA, 21 bp, synthetic construct
  misc_feature 1..21: note = Synthetic construct
  source 1..21: mol_type = other DNA
gcagctggatacgacagacgg

SEQ ID NO: 6578 - DNA, 21 bp, synthetic construct
  misc_feature 1..21: note = Synthetic construct
  source 1..21: mol_type = other DNA
cagctggatacgacagacggc

SEQ ID NO: 6579 - DNA, 21 bp, synthetic construct
  misc_feature 1..21: note = Synthetic construct
  source 1..21: mol_type = other DNA
agctggatacgacagacggcc

SEQ ID NO: 6580 - DNA, 21 bp, synthetic construct
  misc_feature 1..21: note = Synthetic construct
  source 1..21: mol_type = other DNA
gctggatacgacagacggcca

SEQ ID NO: 6581 - DNA, 21 bp, synthetic construct
  misc_feature 1..21: note = Synthetic construct
  source 1..21: mol_type = other DNA
ctggatacgacagacggccat

SEQ ID NO: 6582 - DNA, 21 bp, synthetic construct
  misc_feature 1..21: note = Synthetic construct
  source 1..21: mol_type = other DNA
tggatacgacagacggccatc

SEQ ID NO: 6583 - DNA, 21 bp, synthetic construct
  misc_feature 1..21: note = Synthetic construct
  source 1..21: mol_type = other DNA
ggatacgacagacggccatct

SEQ ID NO: 6584 - DNA, 21 bp, synthetic construct
  misc_feature 1..21: note = Synthetic construct
  source 1..21: mol_type = other DNA
gatacgacagacggccatcta

SEQ ID NO: 6585 - DNA, 21 bp, synthetic construct
  misc_feature 1..21: note = Synthetic construct
  source 1..21: mol_type = other DNA
atacgacagacggccatctaa

SEQ ID NO: 6586 - DNA, 21 bp, synthetic construct
  misc_feature 1..21: note = Synthetic construct
  source 1..21: mol_type = other DNA
tacgacagacggccatctaac

SEQ ID NO: 6587 - DNA, 21 bp, synthetic construct
  misc_feature 1..21: note = Synthetic construct
  source 1..21: mol_type = other DNA
acgacagacggccatctaact

SEQ ID NO: 6588 - DNA, 21 bp, synthetic construct
  misc_feature 1..21: note = Synthetic construct
  source 1..21: mol_type = other DNA
cgacagacggccatctaactt

SEQ ID NO: 6589 - DNA, 21 bp, synthetic construct
  misc_feature 1..21: note = Synthetic construct
  source 1..21: mol_type = other DNA
gacagacggccatctaacttg

SEQ ID NO: 6590 - DNA, 21 bp, synthetic construct
  misc_feature 1..21: note = Synthetic construct
  source 1..21: mol_type = other DNA
acagacggccatctaacttga

SEQ ID NO: 6591 - DNA, 21 bp, synthetic construct
  misc_feature 1..21: note = Synthetic construct
  source 1..21: mol_type = other DNA
cagacggccatctaacttgat

SEQ ID NO: 6592 - DNA, 21 bp, synthetic construct
  misc_feature 1..21: note = Synthetic construct
  source 1..21: mol_type = other DNA
agacggccatctaacttgatg

SEQ ID NO: 6593 - DNA, 21 bp, synthetic construct
  misc_feature 1..21: note = Synthetic construct
  source 1..21: mol_type = other DNA
gacggccatctaacttgatgt

SEQ ID NO: 6594 - DNA, 21 bp, synthetic construct
  misc_feature 1..21: note = Synthetic construct
  source 1..21: mol_type = other DNA
acggccatctaacttgatgtt

SEQ ID NO: 6595 - DNA, 21 bp, synthetic construct
  misc_feature 1..21: note = Synthetic construct
  source 1..21: mol_type = other DNA
cggccatctaacttgatgtta

SEQ ID NO: 6596 - DNA, 21 bp, synthetic construct
  misc_feature 1..21: note = Synthetic construct
  source 1..21: mol_type = other DNA
ggccatctaacttgatgttag

SEQ ID NO: 6597 - DNA, 21 bp, synthetic construct
  misc_feature 1..21: note = Synthetic construct
  source 1..21: mol_type = other DNA
gccatctaacttgatgttagt

SEQ ID NO: 6598 - DNA, 21 bp, synthetic construct
  misc_feature 1..21: note = Synthetic construct
  source 1..21: mol_type = other DNA
ccatctaacttgatgttagta

SEQ ID NO: 6599 - DNA, 21 bp, synthetic construct
  misc_feature 1..21: note = Synthetic construct
  source 1..21: mol_type = other DNA
catctaacttgatgttagtac

SEQ ID NO: 6600 - DNA, 21 bp, synthetic construct
  misc_feature 1..21: note = Synthetic construct
  source 1..21: mol_type = other DNA
atctaacttgatgttagtacc

SEQ ID NO: 6601 - DNA, 21 bp, synthetic construct
  misc_feature 1..21: note = Synthetic construct
  source 1..21: mol_type = other DNA
tctaacttgatgttagtaccg

SEQ ID NO: 6602 - DNA, 21 bp, synthetic construct
  misc_feature 1..21: note = Synthetic construct
  source 1..21: mol_type = other DNA
ctaacttgatgttagtaccga

SEQ ID NO: 6603 - DNA, 21 bp, synthetic construct
  misc_feature 1..21: note = Synthetic construct
  source 1..21: mol_type = other DNA
taacttgatgttagtaccgac

SEQ ID NO: 6604 - DNA, 21 bp, synthetic construct
  misc_feature 1..21: note = Synthetic construct
  source 1..21: mol_type = other DNA
aacttgatgttagtaccgacc

SEQ ID NO: 6605 - DNA, 21 bp, synthetic construct
  misc_feature 1..21: note = Synthetic construct
  source 1..21: mol_type = other DNA
acttgatgttagtaccgacct

SEQ ID NO: 6606 - DNA, 21 bp, synthetic construct
  misc_feature 1..21: note = Synthetic construct
  source 1..21: mol_type = other DNA
cttgatgttagtaccgacctg

SEQ ID NO: 6607 - DNA, 21 bp, synthetic construct
  misc_feature 1..21: note = Synthetic construct
  source 1..21: mol_type = other DNA
ttgatgttagtaccgacctga

SEQ ID NO: 6608 - DNA, 21 bp, synthetic construct
  misc_feature 1..21: note = Synthetic construct
  source 1..21: mol_type = other DNA
tgatgttagtaccgacctgac

SEQ ID NO: 6609 - DNA, 21 bp, synthetic construct
  misc_feature 1..21: note = Synthetic construct
  source 1..21: mol_type = other DNA
gatgttagtaccgacctgacg

SEQ ID NO: 6610 - DNA, 21 bp, synthetic construct
  misc_feature 1..21: note = Synthetic construct
  source 1..21: mol_type = other DNA
atgttagtaccgacctgacgt

SEQ ID NO: 6611 - DNA, 21 bp, synthetic construct
  misc_feature 1..21: note = Synthetic construct
  source 1..21: mol_type = other DNA
tgttagtaccgacctgacgta

SEQ ID NO: 6612 - DNA, 21 bp, synthetic construct
  misc_feature 1..21: note = Synthetic construct
  source 1..21: mol_type = other DNA
gttagtaccgacctgacgtac

SEQ ID NO: 6613 - DNA, 21 bp, synthetic construct
  misc_feature 1..21: note = Synthetic construct
  source 1..21: mol_type = other DNA
ttagtaccgacctgacgtacg

SEQ ID NO: 6614 - DNA, 21 bp, synthetic construct
  misc_feature 1..21: note = Synthetic construct
  source 1..21: mol_type = other DNA
tagtaccgacctgacgtacgg

SEQ ID NO: 6615 - DNA, 21 bp, synthetic construct
  misc_feature 1..21: note = Synthetic construct
  source 1..21: mol_type = other DNA
agtaccgacctgacgtacggc

SEQ ID NO: 6616 - DNA, 21 bp, synthetic construct
  misc_feature 1..21: note = Synthetic construct
  source 1..21: mol_type = other DNA
gtaccgacctgacgtacggct

SEQ ID NO: 6617 - DNA, 21 bp, synthetic construct
  misc_feature 1..21: note = Synthetic construct
  source 1..21: mol_type = other DNA
taccgacctgacgtacggctc

SEQ ID NO: 6618 - DNA, 21 bp, synthetic construct
  misc_feature 1..21: note = Synthetic construct
  source 1..21: mol_type = other DNA
accgacctgacgtacggctct

SEQ ID NO: 6619 - DNA, 21 bp, synthetic construct
  misc_feature 1..21: note = Synthetic construct
  source 1..21: mol_type = other DNA
ccgacctgacgtacggctctc

SEQ ID NO: 6620 - DNA, 21 bp, synthetic construct
  misc_feature 1..21: note = Synthetic construct
  source 1..21: mol_type = other DNA
cgacctgacgtacggctctca

SEQ ID NO: 6621 - DNA, 21 bp, synthetic construct
  misc_feature 1..21: note = Synthetic construct
  source 1..21: mol_type = other DNA
gacctgacgtacggctctcat

SEQ ID NO: 6622 - DNA, 21 bp, synthetic construct
  misc_feature 1..21: note = Synthetic construct
  source 1..21: mol_type = other DNA
acctgacgtacggctctcata

SEQ ID NO: 6623 - DNA, 21 bp, synthetic construct
  misc_feature 1..21: note = Synthetic construct
  source 1..21: mol_type = other DNA
cctgacgtacggctctcatag

SEQ ID NO: 6624 - DNA, 21 bp, synthetic construct
  misc_feature 1..21: note = Synthetic construct
  source 1..21: mol_type = other DNA
ctgacgtacggctctcatagg

SEQ ID NO: 6625 - DNA, 21 bp, synthetic construct
  misc_feature 1..21: note = Synthetic construct
  source 1..21: mol_type = other DNA
tgacgtacggctctcatagga

SEQ ID NO: 6626 - DNA, 21 bp, synthetic construct
  misc_feature 1..21: note = Synthetic construct
  source 1..21: mol_type = other DNA
gacgtacggctctcataggaa

SEQ ID NO: 6627 - DNA, 21 bp, synthetic construct
  misc_feature 1..21: note = Synthetic construct
  source 1..21: mol_type = other DNA
acgtacggctctcataggaag

SEQ ID NO: 6628 - DNA, 21 bp, synthetic construct
  misc_feature 1..21: note = Synthetic construct
  source 1..21: mol_type = other DNA
cgtacggctctcataggaaga

SEQ ID NO: 6629 - DNA, 21 bp, synthetic construct
  misc_feature 1..21: note = Synthetic construct
  source 1..21: mol_type = other DNA
gtacggctctcataggaagaa

SEQ ID NO: 6630 - DNA, 21 bp, synthetic construct
  misc_feature 1..21: note = Synthetic construct
  source 1..21: mol_type = other DNA
tacggctctcataggaagaaa

SEQ ID NO: 6631 - DNA, 21 bp, synthetic construct
  misc_feature 1..21: note = Synthetic construct
  source 1..21: mol_type = other DNA
acggctctcataggaagaaac

SEQ ID NO: 6632 - DNA, 21 bp, synthetic construct
  misc_feature 1..21: note = Synthetic construct
  source 1..21: mol_type = other DNA
cggctctcataggaagaaact

SEQ ID NO: 6633 - DNA, 21 bp, synthetic construct
  misc_feature 1..21: note = Synthetic construct
  source 1..21: mol_type = other DNA
ggctctcataggaagaaactc

SEQ ID NO: 6634 - DNA, 21 bp, synthetic construct
  misc_feature 1..21: note = Synthetic construct
  source 1..21: mol_type = other DNA
gctctcataggaagaaactct

SEQ ID NO: 6635 - DNA, 21 bp, synthetic construct
  misc_feature 1..21: note = Synthetic construct
  source 1..21: mol_type = other DNA
ctctcataggaagaaactctt

SEQ ID NO: 6636 - DNA, 21 bp, synthetic construct
  misc_feature 1..21: note = Synthetic construct
  source 1..21: mol_type = other DNA
tctcataggaagaaactcttg

SEQ ID NO: 6637 - DNA, 21 bp, synthetic construct
  misc_feature 1..21: note = Synthetic construct
  source 1..21: mol_type = other DNA
ctcataggaagaaactcttga

SEQ ID NO: 6638 - DNA, 21 bp, synthetic construct
  misc_feature 1..21: note = Synthetic construct
  source 1..21: mol_type = other DNA
tcataggaagaaactcttgaa

SEQ ID NO: 6639 - DNA, 21 bp, synthetic construct
  misc_feature 1..21: note = Synthetic construct
  source 1..21: mol_type = other DNA
cataggaagaaactcttgaag

SEQ ID NO: 6640 - DNA, 21 bp, synthetic construct
  misc_feature 1..21: note = Synthetic construct
  source 1..21: mol_type = other DNA
ataggaagaaactcttgaagg

SEQ ID NO: 6641 - DNA, 21 bp, synthetic construct
  misc_feature 1..21: note = Synthetic construct
  source 1..21: mol_type = other DNA
taggaagaaactcttgaaggt

SEQ ID NO: 6642 - DNA, 21 bp, synthetic construct
  misc_feature 1..21: note = Synthetic construct
  source 1..21: mol_type = other DNA
aggaagaaactcttgaaggtg

SEQ ID NO: 6643 - DNA, 21 bp, synthetic construct
  misc_feature 1..21: note = Synthetic construct
  source 1..21: mol_type = other DNA
ggaagaaactcttgaaggtga

SEQ ID NO: 6644 - DNA, 21 bp, synthetic construct
  misc_feature 1..21: note = Synthetic construct
  source 1..21: mol_type = other DNA
gaagaaactcttgaaggtgaa

SEQ ID NO: 6645 - DNA, 21 bp, synthetic construct
  misc_feature 1..21: note = Synthetic construct
  source 1..21: mol_type = other DNA
aagaaactcttgaaggtgaac

SEQ ID NO: 6646 - DNA, 21 bp, synthetic construct
  misc_feature 1..21: note = Synthetic construct
  source 1..21: mol_type = other DNA
agaaactcttgaaggtgaacc

SEQ ID NO: 6647 - DNA, 21 bp, synthetic construct
  misc_feature 1..21: note = Synthetic construct
  source 1..21: mol_type = other DNA
gaaactcttgaaggtgaacct

SEQ ID NO: 6648 - DNA, 21 bp, synthetic construct
  misc_feature 1..21: note = Synthetic construct
  source 1..21: mol_type = other DNA
aaactcttgaaggtgaacctt

SEQ ID NO: 6649 - DNA, 21 bp, synthetic construct
  misc_feature 1..21: note = Synthetic construct
  source 1..21: mol_type = other DNA
aactcttgaaggtgaaccttc

SEQ ID NO: 6650 - DNA, 21 bp, synthetic construct
  misc_feature 1..21: note = Synthetic construct
  source 1..21: mol_type = other DNA
actcttgaaggtgaaccttcg

SEQ ID NO: 6651 - DNA, 21 bp, synthetic construct
  misc_feature 1..21: note = Synthetic construct
  source 1..21: mol_type = other DNA
ctcttgaaggtgaaccttcgt

SEQ ID NO: 6652 - DNA, 21 bp, synthetic construct
  misc_feature 1..21: note = Synthetic construct
  source 1..21: mol_type = other DNA
tcttgaaggtgaaccttcgta

SEQ ID NO: 6653 - DNA, 21 bp, synthetic construct
  misc_feature 1..21: note = Synthetic construct
  source 1..21: mol_type = other DNA
cttgaaggtgaaccttcgtaa

SEQ ID NO: 6654 - DNA, 21 bp, synthetic construct
  misc_feature 1..21: note = Synthetic construct
  source 1..21: mol_type = other DNA
ttgaaggtgaaccttcgtaag

SEQ ID NO: 6655 - DNA, 21 bp, synthetic construct
  misc_feature 1..21: note = Synthetic construct
  source 1..21: mol_type = other DNA
tgaaggtgaaccttcgtaagc

SEQ ID NO: 6656 - DNA, 21 bp, synthetic construct
  misc_feature 1..21: note = Synthetic construct
  source 1..21: mol_type = other DNA
gaaggtgaaccttcgtaagca

SEQ ID NO: 6657 - DNA, 21 bp, synthetic construct
  misc_feature 1..21: note = Synthetic construct
  source 1..21: mol_type = other DNA
aaggtgaaccttcgtaagcat

SEQ ID NO: 6658 - DNA, 21 bp, synthetic construct
  misc_feature 1..21: note = Synthetic construct
  source 1..21: mol_type = other DNA
aggtgaaccttcgtaagcatc

SEQ ID NO: 6659 - DNA, 21 bp, synthetic construct
  misc_feature 1..21: note = Synthetic construct
  source 1..21: mol_type = other DNA
ggtgaaccttcgtaagcatct

SEQ ID NO: 6660 - DNA, 21 bp, synthetic construct
  misc_feature 1..21: note = Synthetic construct
  source 1..21: mol_type = other DNA
gtgaaccttcgtaagcatctc

SEQ ID NO: 6661 - DNA, 21 bp, synthetic construct
  misc_feature 1..21: note = Synthetic construct
  source 1..21: mol_type = other DNA
tgaaccttcgtaagcatctca

SEQ ID NO: 6662 - DNA, 21 bp, synthetic construct
  misc_feature 1..21: note = Synthetic construct
  source 1..21: mol_type = other DNA
gaaccttcgtaagcatctcat

SEQ ID NO: 6663 - DNA, 21 bp, synthetic construct
  misc_feature 1..21: note = Synthetic construct
  source 1..21: mol_type = other DNA
aaccttcgtaagcatctcata

SEQ ID NO: 6664 - DNA, 21 bp, synthetic construct
  misc_feature 1..21: note = Synthetic construct
  source 1..21: mol_type = other DNA
accttcgtaagcatctcatat

SEQ ID NO: 6665 - DNA, 21 bp, synthetic construct
  misc_feature 1..21: note = Synthetic construct
  source 1..21: mol_type = other DNA
ccttcgtaagcatctcatatg

SEQ ID NO: 6666 - DNA, 21 bp, synthetic construct
  misc_feature 1..21: note = Synthetic construct
  source 1..21: mol_type = other DNA
cttcgtaagcatctcatatgc

SEQ ID NO: 6667 - DNA, 21 bp, synthetic construct
  misc_feature 1..21: note = Synthetic construct
  source 1..21: mol_type = other DNA
ttcgtaagcatctcatatgca

SEQ ID NO: 6668 - DNA, 21 bp, synthetic construct
  misc_feature 1..21: note = Synthetic construct
  source 1..21: mol_type = other DNA
tcgtaagcatctcatatgcac

SEQ ID NO: 6669 - DNA, 21 bp, synthetic construct
  misc_feature 1..21: note = Synthetic construct
  source 1..21: mol_type = other DNA
cgtaagcatctcatatgcacc

SEQ ID NO: 6670 - DNA, 21 bp, synthetic construct
  misc_feature 1..21: note = Synthetic construct
  source 1..21: mol_type = other DNA
gtaagcatctcatatgcaccc

SEQ ID NO: 6671 - DNA, 21 bp, synthetic construct
  misc_feature 1..21: note = Synthetic construct
  source 1..21: mol_type = other DNA
taagcatctcatatgcaccct

SEQ ID NO: 6672 - DNA, 21 bp, synthetic construct
  misc_feature 1..21: note = Synthetic construct
  source 1..21: mol_type = other DNA
aagcatctcatatgcaccctg

SEQ ID NO: 6673 - DNA, 21 bp, synthetic construct
  misc_feature 1..21: note = Synthetic construct
  source 1..21: mol_type = other DNA
agcatctcatatgcaccctgg

SEQ ID NO: 6674 - DNA, 21 bp, synthetic construct
  misc_feature 1..21: note = Synthetic construct
  source 1..21: mol_type = other DNA
gcatctcatatgcaccctgga

SEQ ID NO: 6675 - DNA, 21 bp, synthetic construct
  misc_feature 1..21: note = Synthetic construct
  source 1..21: mol_type = other DNA
catctcatatgcaccctggat

SEQ ID NO: 6676 - DNA, 21 bp, synthetic construct
  misc_feature 1..21: note = Synthetic construct
  source 1..21: mol_type = other DNA
atctcatatgcaccctggata

SEQ ID NO: 6677 - DNA, 21 bp, synthetic construct
  misc_feature 1..21: note = Synthetic construct
  source 1..21: mol_type = other DNA
tctcatatgcaccctggatat

SEQ ID NO: 6678 - DNA, 21 bp, synthetic construct
  misc_feature 1..21: note = Synthetic construct
  source 1..21: mol_type = other DNA
ctcatatgcaccctggatatc

SEQ ID NO: 6679 - DNA, 21 bp, synthetic construct
  misc_feature 1..21: note = Synthetic construct
  source 1..21: mol_type = other DNA
tcatatgcaccctggatatca

SEQ ID NO: 6680 - DNA, 21 bp, synthetic construct
  misc_feature 1..21: note = Synthetic construct
  source 1..21: mol_type = other DNA
catatgcaccctggatatcac

SEQ ID NO: 6681 - DNA, 21 bp, synthetic construct
  misc_feature 1..21: note = Synthetic construct
  source 1..21: mol_type = other DNA
atatgcaccctggatatcact

SEQ ID NO: 6682 - DNA, 21 bp, synthetic construct
  misc_feature 1..21: note = Synthetic construct
  source 1..21: mol_type = other DNA
tatgcaccctggatatcactc

SEQ ID NO: 6683 - DNA, 21 bp, synthetic construct
  misc_feature 1..21: note = Synthetic construct
  source 1..21: mol_type = other DNA
atgcaccctggatatcactca

SEQ ID NO: 6684 - DNA, 21 bp, synthetic construct
  misc_feature 1..21: note = Synthetic construct
  source 1..21: mol_type = other DNA
tgcaccctggatatcactcat

SEQ ID NO: 6685 - DNA, 21 bp, synthetic construct
  misc_feature 1..21: note = Synthetic construct
  source 1..21: mol_type = other DNA
gcaccctggatatcactcatt

SEQ ID NO: 6686 - DNA, 21 bp, synthetic construct
  misc_feature 1..21: note = Synthetic construct
  source 1..21: mol_type = other DNA
caccctggatatcactcatta

SEQ ID NO: 6687 - DNA, 21 bp, synthetic construct
  misc_feature 1..21: note = Synthetic construct
  source 1..21: mol_type = other DNA
accctggatatcactcattag

SEQ ID NO: 6688 - DNA, 21 bp, synthetic construct
  misc_feature 1..21: note = Synthetic construct
  source 1..21: mol_type = other DNA
ccctggatatcactcattagt

SEQ ID NO: 6689 - DNA, 21 bp, synthetic construct
  misc_feature 1..21: note = Synthetic construct
  source 1..21: mol_type = other DNA
cctggatatcactcattagtg

SEQ ID NO: 6690 - DNA, 21 bp, synthetic construct
  misc_feature 1..21: note = Synthetic construct
  source 1..21: mol_type = other DNA
ctggatatcactcattagtgg

SEQ ID NO: 6691 - DNA, 21 bp, synthetic construct
  misc_feature 1..21: note = Synthetic construct
  source 1..21: mol_type = other DNA
tggatatcactcattagtggt

SEQ ID NO: 6692 - DNA, 21 bp, synthetic construct
  misc_feature 1..21: note = Synthetic construct
  source 1..21: mol_type = other DNA
ggatatcactcattagtggta

SEQ ID NO: 6693 - DNA, 21 bp, synthetic construct
  misc_feature 1..21: note = Synthetic construct
  source 1..21: mol_type = other DNA
gatatcactcattagtggtaa

SEQ ID NO: 6694 - DNA, 21 bp, synthetic construct
  misc_feature 1..21: note = Synthetic construct
  source 1..21: mol_type = other DNA
atatcactcattagtggtaac

SEQ ID NO: 6695 - DNA, 21 bp, synthetic construct
  misc_feature 1..21: note = Synthetic construct
  source 1..21: mol_type = other DNA
tatcactcattagtggtaacc

SEQ ID NO: 6696 - DNA, 21 bp, synthetic construct
  misc_feature 1..21: note = Synthetic construct
  source 1..21: mol_type = other DNA
atcactcattagtggtaacca

SEQ ID NO: 6697 - DNA, 21 bp, synthetic construct
  misc_feature 1..21: note = Synthetic construct
  source 1..21: mol_type = other DNA
tcactcattagtggtaaccaa

SEQ ID NO: 6698 - DNA, 21 bp, synthetic construct
  misc_feature 1..21: note = Synthetic construct
  source 1..21: mol_type = other DNA
cactcattagtggtaaccaac

SEQ ID NO: 6699 - DNA, 21 bp, synthetic construct
  misc_feature 1..21: note = Synthetic construct
  source 1..21: mol_type = other DNA
actcattagtggtaaccaacc

SEQ ID NO: 6700 - DNA, 21 bp, synthetic construct
  misc_feature 1..21: note = Synthetic construct
  source 1..21: mol_type = other DNA
ctcattagtggtaaccaaccg

SEQ ID NO: 6701 - DNA, 21 bp, synthetic construct
  misc_feature 1..21: note = Synthetic construct
  source 1..21: mol_type = other DNA
tcattagtggtaaccaaccga

SEQ ID NO: 6702 - DNA, 21 bp, synthetic construct
  misc_feature 1..21: note = Synthetic construct
  source 1..21: mol_type = other DNA
cattagtggtaaccaaccgaa

SEQ ID NO: 6703 - DNA, 21 bp, synthetic construct
  misc_feature 1..21: note = Synthetic construct
  source 1..21: mol_type = other DNA
attagtggtaaccaaccgaac

SEQ ID NO: 6704 - DNA, 21 bp, synthetic construct
  misc_feature 1..21: note = Synthetic construct
  source 1..21: mol_type = other DNA
ttagtggtaaccaaccgaact

SEQ ID NO: 6705 - DNA, 21 bp, synthetic construct
  misc_feature 1..21: note = Synthetic construct
  source 1..21: mol_type = other DNA
tagtggtaaccaaccgaactg

SEQ ID NO: 6706 - DNA, 21 bp, synthetic construct
  misc_feature 1..21: note = Synthetic construct
  source 1..21: mol_type = other DNA
agtggtaaccaaccgaactgc

SEQ ID NO: 6707 - DNA, 21 bp, synthetic construct
  misc_feature 1..21: note = Synthetic construct
  source 1..21: mol_type = other DNA
gtggtaaccaaccgaactgca

SEQ ID NO: 6708 - DNA, 21 bp, synthetic construct
  misc_feature 1..21: note = Synthetic construct
  source 1..21: mol_type = other DNA
tggtaaccaaccgaactgcaa

SEQ ID NO: 6709 - DNA, 21 bp, synthetic construct
  misc_feature 1..21: note = Synthetic construct
  source 1..21: mol_type = other DNA
ggtaaccaaccgaactgcaac

SEQ ID NO: 6710 - DNA, 21 bp, synthetic construct
  misc_feature 1..21: note = Synthetic construct
  source 1..21: mol_type = other DNA
gtaaccaaccgaactgcaact

SEQ ID NO: 6711 - DNA, 21 bp, synthetic construct
  misc_feature 1..21: note = Synthetic construct
  source 1..21: mol_type = other DNA
taaccaaccgaactgcaactc

SEQ ID NO: 6712 - DNA, 21 bp, synthetic construct
  misc_feature 1..21: note = Synthetic construct
  source 1..21: mol_type = other DNA
aaccaaccgaactgcaactcc

SEQ ID NO: 6713 - DNA, 21 bp, synthetic construct
  misc_feature 1..21: note = Synthetic construct
  source 1..21: mol_type = other DNA
accaaccgaactgcaactcca

SEQ ID NO: 6714 - DNA, 21 bp, synthetic construct
  misc_feature 1..21: note = Synthetic construct
  source 1..21: mol_type = other DNA
ccaaccgaactgcaactccaa

SEQ ID NO: 6715 - DNA, 21 bp, synthetic construct
  misc_feature 1..21: note = Synthetic construct
  source 1..21: mol_type = other DNA
caaccgaactgcaactccaac

SEQ ID NO: 6716 - DNA, 21 bp, synthetic construct
  misc_feature 1..21: note = Synthetic construct
  source 1..21: mol_type = other DNA
aaccgaactgcaactccaacc

SEQ ID NO: 6717 - DNA, 21 bp, synthetic construct
  misc_feature 1..21: note = Synthetic construct
  source 1..21: mol_type = other DNA
accgaactgcaactccaacca

SEQ ID NO: 6718 - DNA, 21 bp, synthetic construct
  misc_feature 1..21: note = Synthetic construct
  source 1..21: mol_type = other DNA
ccgaactgcaactccaaccac

SEQ ID NO: 6719 - DNA, 21 bp, synthetic construct
  misc_feature 1..21: note = Synthetic construct
  source 1..21: mol_type = other DNA
cgaactgcaactccaaccacc

SEQ ID NO: 6720 - DNA, 21 bp, synthetic construct
  misc_feature 1..21: note = Synthetic construct
  source 1..21: mol_type = other DNA
gaactgcaactccaaccacct

SEQ ID NO: 6721 - DNA, 21 bp, synthetic construct
  misc_feature 1..21: note = Synthetic construct
  source 1..21: mol_type = other DNA
aactgcaactccaaccacctg

SEQ ID NO: 6722 - DNA, 21 bp, synthetic construct
  misc_feature 1..21: note = Synthetic construct
  source 1..21: mol_type = other DNA
actgcaactccaaccacctgc

SEQ ID NO: 6723 - DNA, 21 bp, synthetic construct
  misc_feature 1..21: note = Synthetic construct
  source 1..21: mol_type = other DNA
ctgcaactccaaccacctgcc

SEQ ID NO: 6724 - DNA, 21 bp, synthetic construct
  misc_feature 1..21: note = Synthetic construct
  source 1..21: mol_type = other DNA
tgcaactccaaccacctgccg

SEQ ID NO: 6725 - DNA, 21 bp, synthetic construct
  misc_feature 1..21: note = Synthetic construct
  source 1..21: mol_type = other DNA
gcaactccaaccacctgccgg

SEQ ID NO: 6726 - DNA, 21 bp, synthetic construct
  misc_feature 1..21: note = Synthetic construct
  source 1..21: mol_type = other DNA
caactccaaccacctgccggc

SEQ ID NO: 6727 - DNA, 21 bp, synthetic construct
  misc_feature 1..21: note = Synthetic construct
  source 1..21: mol_type = other DNA
aactccaaccacctgccggcc

SEQ ID NO: 6728 - DNA, 21 bp, synthetic construct
  misc_feature 1..21: note = Synthetic construct
  source 1..21: mol_type = other DNA
actccaaccacctgccggcca

SEQ ID NO: 6729 - DNA, 21 bp, synthetic construct
  misc_feature 1..21: note = Synthetic construct
  source 1..21: mol_type = other DNA
ctccaaccacctgccggccac

SEQ ID NO: 6730 - DNA, 21 bp, synthetic construct
  misc_feature 1..21: note = Synthetic construct
  source 1..21: mol_type = other DNA
tccaaccacctgccggccacg

SEQ ID NO: 6731 - DNA, 21 bp, synthetic construct
  misc_feature 1..21: note = Synthetic construct
  source 1..21: mol_type = other DNA
ccaaccacctgccggccacgt

SEQ ID NO: 6732 - DNA, 21 bp, synthetic construct
  misc_feature 1..21: note = Synthetic construct
  source 1..21: mol_type = other DNA
caaccacctgccggccacgtg

SEQ ID NO: 6733 - DNA, 21 bp, synthetic construct
  misc_feature 1..21: note = Synthetic construct
  source 1..21: mol_type = other DNA
aaccacctgccggccacgtgt

SEQ ID NO: 6734 - DNA, 21 bp, synthetic construct
  misc_feature 1..21: note = Synthetic construct
  source 1..21: mol_type = other DNA
accacctgccggccacgtgtt

SEQ ID NO: 6735 - DNA, 21 bp, synthetic construct
  misc_feature 1..21: note = Synthetic construct
  source 1..21: mol_type = other DNA
ccacctgccggccacgtgttt

SEQ ID NO: 6736 - DNA, 21 bp, synthetic construct
  misc_feature 1..21: note = Synthetic construct
  source 1..21: mol_type = other DNA
cacctgccggccacgtgtttt

SEQ ID NO: 6737 - DNA, 21 bp, synthetic construct
  misc_feature 1..21: note = Synthetic construct
  source 1..21: mol_type = other DNA
acctgccggccacgtgttttg

SEQ ID NO: 6738 - DNA, 21 bp, synthetic construct
  misc_feature 1..21: note = Synthetic construct
  source 1..21: mol_type = other DNA
cctgccggccacgtgttttga

SEQ ID NO: 6739 - DNA, 21 bp, synthetic construct
  misc_feature 1..21: note = Synthetic construct
  source 1..21: mol_type = other DNA
ctgccggccacgtgttttgat

SEQ ID NO: 6740 - DNA, 21 bp, synthetic construct
  misc_feature 1..21: note = Synthetic construct
  source 1..21: mol_type = other DNA
tgccggccacgtgttttgatc

SEQ ID NO: 6741 - DNA, 21 bp, synthetic construct
  misc_feature 1..21: note = Synthetic construct
  source 1..21: mol_type = other DNA
gccggccacgtgttttgatcg

SEQ ID NO: 6742 - DNA, 21 bp, synthetic construct
  misc_feature 1..21: note = Synthetic construct
  source 1..21: mol_type = other DNA
ccggccacgtgttttgatcga

SEQ ID NO: 6743 - DNA, 21 bp, synthetic construct
  misc_feature 1..21: note = Synthetic construct
  source 1..21: mol_type = other DNA
cggccacgtgttttgatcgaa

SEQ ID NO: 6744 - DNA, 21 bp, synthetic construct
  misc_feature 1..21: note = Synthetic construct
  source 1..21: mol_type = other DNA
ggccacgtgttttgatcgaaa

SEQ ID NO: 6745 - DNA, 21 bp, synthetic construct
  misc_feature 1..21: note = Synthetic construct
  source 1..21: mol_type = other DNA
gccacgtgttttgatcgaaac

SEQ ID NO: 6746 - DNA, 21 bp, synthetic construct
  misc_feature 1..21: note = Synthetic construct
  source 1..21: mol_type = other DNA
ccacgtgttttgatcgaaact

SEQ ID NO: 6747 - DNA, 21 bp, synthetic construct
  misc_feature 1..21: note = Synthetic construct
  source 1..21: mol_type = other DNA
cacgtgttttgatcgaaactt

SEQ ID NO: 6748 - DNA, 21 bp, synthetic construct
  misc_feature 1..21: note = Synthetic construct
  source 1..21: mol_type = other DNA
acgtgttttgatcgaaacttt

SEQ ID NO: 6749 - DNA, 21 bp, synthetic construct
  misc_feature 1..21: note = Synthetic construct
  source 1..21: mol_type = other DNA
cgtgttttgatcgaaactttc

SEQ ID NO: 6750 - DNA, 21 bp, synthetic construct
  misc_feature 1..21: note = Synthetic construct
  source 1..21: mol_type = other DNA
gtgttttgatcgaaactttcg

SEQ ID NO: 6751 - DNA, 21 bp, synthetic construct
  misc_feature 1..21: note = Synthetic construct
  source 1..21: mol_type = other DNA
tgttttgatcgaaactttcga

SEQ ID NO: 6752 - DNA, 21 bp, synthetic construct
  misc_feature 1..21: note = Synthetic construct
  source 1..21: mol_type = other DNA
gttttgatcgaaactttcgat

SEQ ID NO: 6753 - DNA, 21 bp, synthetic construct
  misc_feature 1..21: note = Synthetic construct
  source 1..21: mol_type = other DNA
ttttgatcgaaactttcgatc

SEQ ID NO: 6754 - DNA, 21 bp, synthetic construct
  misc_feature 1..21: note = Synthetic construct
  source 1..21: mol_type = other DNA
tttgatcgaaactttcgatct

SEQ ID NO: 6755 - DNA, 21 bp, synthetic construct
  misc_feature 1..21: note = Synthetic construct
  source 1..21: mol_type = other DNA
ttgatcgaaactttcgatctt

SEQ ID NO: 6756 - DNA, 21 bp, synthetic construct
  misc_feature 1..21: note = Synthetic construct
  source 1..21: mol_type = other DNA
tgatcgaaactttcgatcttc

SEQ ID NO: 6757 - DNA, 21 bp, synthetic construct
  misc_feature 1..21: note = Synthetic construct
  source 1..21: mol_type = other DNA
gatcgaaactttcgatcttcg

SEQ ID NO: 6758 - DNA, 21 bp, synthetic construct
  misc_feature 1..21: note = Synthetic construct
  source 1..21: mol_type = other DNA
atcgaaactttcgatcttcgt

SEQ ID NO: 6759 - DNA, 21 bp, synthetic construct
  misc_feature 1..21: note = Synthetic construct
  source 1..21: mol_type = other DNA
tcgaaactttcgatcttcgtt

SEQ ID NO: 6760 - DNA, 21 bp, synthetic construct
  misc_feature 1..21: note = Synthetic construct
  source 1..21: mol_type = other DNA
cgaaactttcgatcttcgttt

SEQ ID NO: 6761 - DNA, 21 bp, synthetic construct
  misc_feature 1..21: note = Synthetic construct
  source 1..21: mol_type = other DNA
gaaactttcgatcttcgttta

SEQ ID NO: 6762 - DNA, 21 bp, synthetic construct
  misc_feature 1..21: note = Synthetic construct
  source 1..21: mol_type = other DNA
aaactttcgatcttcgtttag

SEQ ID NO: 6763 - DNA, 21 bp, synthetic construct
  misc_feature 1..21: note = Synthetic construct
  source 1..21: mol_type = other DNA
aactttcgatcttcgtttagg

SEQ ID NO: 6764 - DNA, 21 bp, synthetic construct
  misc_feature 1..21: note = Synthetic construct
  source 1..21: mol_type = other DNA
actttcgatcttcgtttaggg

SEQ ID NO: 6765 - DNA, 21 bp, synthetic construct
  misc_feature 1..21: note = Synthetic construct
  source 1..21: mol_type = other DNA
ctttcgatcttcgtttagggc

SEQ ID NO: 6766 - DNA, 21 bp, synthetic construct
  misc_feature 1..21: note = Synthetic construct
  source 1..21: mol_type = other DNA
tttcgatcttcgtttagggca

SEQ ID NO: 6767 - DNA, 21 bp, synthetic construct
  misc_feature 1..21: note = Synthetic construct
  source 1..21: mol_type = other DNA
ttcgatcttcgtttagggcaa

SEQ ID NO: 6768 - DNA, 21 bp, synthetic construct
  misc_feature 1..21: note = Synthetic construct
  source 1..21: mol_type = other DNA
tcgatcttcgtttagggcaag

SEQ ID NO: 6769 - DNA, 21 bp, synthetic construct
  misc_feature 1..21: note = Synthetic construct
  source 1..21: mol_type = other DNA
cgatcttcgtttagggcaagg

SEQ ID NO: 6770 - DNA, 21 bp, synthetic construct
  misc_feature 1..21: note = Synthetic construct
  source 1..21: mol_type = other DNA
gatcttcgtttagggcaaggt

SEQ ID NO: 6771 - DNA, 21 bp, synthetic construct
  misc_feature 1..21: note = Synthetic construct
  source 1..21: mol_type = other DNA
atcttcgtttagggcaaggta

SEQ ID NO: 6772 - DNA, 21 bp, synthetic construct
  misc_feature 1..21: note = Synthetic construct
  source 1..21: mol_type = other DNA
tcttcgtttagggcaaggtag

SEQ ID NO: 6773 - DNA, 21 bp, synthetic construct
  misc_feature 1..21: note = Synthetic construct
  source 1..21: mol_type = other DNA
cttcgtttagggcaaggtagc

SEQ ID NO: 6774 - DNA, 21 bp, synthetic construct
  misc_feature 1..21: note = Synthetic construct
  source 1..21: mol_type = other DNA
ttcgtttagggcaaggtagcg

SEQ ID NO: 6775 - DNA, 21 bp, synthetic construct
  misc_feature 1..21: note = Synthetic construct
  source 1..21: mol_type = other DNA
tcgtttagggcaaggtagcgg

SEQ ID NO: 6776 - DNA, 21 bp, synthetic construct
  misc_feature 1..21: note = Synthetic construct
  source 1..21: mol_type = other DNA
cgtttagggcaaggtagcgga

SEQ ID NO: 6777 - DNA, 21 bp, synthetic construct
  misc_feature 1..21: note = Synthetic construct
  source 1..21: mol_type = other DNA
gtttagggcaaggtagcggag

SEQ ID NO: 6778 - DNA, 21 bp, synthetic construct
  misc_feature 1..21: note = Synthetic construct
  source 1..21: mol_type = other DNA
tttagggcaaggtagcggagc

SEQ ID NO: 6779 - DNA, 21 bp, synthetic construct
  misc_feature 1..21: note = Synthetic construct
  source 1..21: mol_type = other DNA
ttagggcaaggtagcggagcg

SEQ ID NO: 6780 - DNA, 21 bp, synthetic construct
  misc_feature 1..21: note = Synthetic construct
  source 1..21: mol_type = other DNA
tagggcaaggtagcggagcgc

SEQ ID NO: 6781 - DNA, 21 bp, synthetic construct
  misc_feature 1..21: note = Synthetic construct
  source 1..21: mol_type = other DNA
agggcaaggtagcggagcgcc

SEQ ID NO: 6782 - DNA, 21 bp, synthetic construct
  misc_feature 1..21: note = Synthetic construct
  source 1..21: mol_type = other DNA
gggcaaggtagcggagcgcct

SEQ ID NO: 6783 - DNA, 21 bp, synthetic construct
  misc_feature 1..21: note = Synthetic construct
  source 1..21: mol_type = other DNA
ggcaaggtagcggagcgcctg

SEQ ID NO: 6784 - DNA, 21 bp, synthetic construct
  misc_feature 1..21: note = Synthetic construct
  source 1..21: mol_type = other DNA
gcaaggtagcggagcgcctgg

SEQ ID NO: 6785 - DNA, 21 bp, synthetic construct
  misc_feature 1..21: note = Synthetic construct
  source 1..21: mol_type = other DNA
caaggtagcggagcgcctggc

SEQ ID NO: 6786 - DNA, 21 bp, synthetic construct
  misc_feature 1..21: note = Synthetic construct
  source 1..21: mol_type = other DNA
aaggtagcggagcgcctggcg

SEQ ID NO: 6787 - DNA, 21 bp, synthetic construct
  misc_feature 1..21: note = Synthetic construct
  source 1..21: mol_type = other DNA
aggtagcggagcgcctggcgc

SEQ ID NO: 6788 - DNA, 21 bp, synthetic construct
  misc_feature 1..21: note = Synthetic construct
  source 1..21: mol_type = other DNA
ggtagcggagcgcctggcgcc

SEQ ID NO: 6789 - DNA, 21 bp, synthetic construct
  misc_feature 1..21: note = Synthetic construct
  source 1..21: mol_type = other DNA
gtagcggagcgcctggcgcca

SEQ ID NO: 6790 - DNA, 21 bp, synthetic construct
  misc_feature 1..21: note = Synthetic construct
  source 1..21: mol_type = other DNA
tagcggagcgcctggcgccaa

SEQ ID NO: 6791 - DNA, 21 bp, synthetic construct
  misc_feature 1..21: note = Synthetic construct
  source 1..21: mol_type = other DNA
agcggagcgcctggcgccaat

SEQ ID NO: 6792 - DNA, 21 bp, synthetic construct
  misc_feature 1..21: note = Synthetic construct
  source 1..21: mol_type = other DNA
gcggagcgcctggcgccaatt

SEQ ID NO: 6793 - DNA, 21 bp, synthetic construct
  misc_feature 1..21: note = Synthetic construct
  source 1..21: mol_type = other DNA
cggagcgcctggcgccaatta

SEQ ID NO: 6794 - DNA, 21 bp, synthetic construct
  misc_feature 1..21: note = Synthetic construct
  source 1..21: mol_type = other DNA
ggagcgcctggcgccaattac

SEQ ID NO: 6795 - DNA, 21 bp, synthetic construct
  misc_feature 1..21: note = Synthetic construct
  source 1..21: mol_type = other DNA
gagcgcctggcgccaattacc

SEQ ID NO: 6796 - DNA, 21 bp, synthetic construct
  misc_feature 1..21: note = Synthetic construct
  source 1..21: mol_type = other DNA
agcgcctggcgccaattaccg

SEQ ID NO: 6797 - DNA, 21 bp, synthetic construct
  misc_feature 1..21: note = Synthetic construct
  source 1..21: mol_type = other DNA
gcgcctggcgccaattaccgc

SEQ ID NO: 6798 - DNA, 21 bp, synthetic construct
  misc_feature 1..21: note = Synthetic construct
  source 1..21: mol_type = other DNA
cgcctggcgccaattaccgcg

SEQ ID NO: 6799 - DNA, 21 bp, synthetic construct
  misc_feature 1..21: note = Synthetic construct
  source 1..21: mol_type = other DNA
gcctggcgccaattaccgcga

SEQ ID NO: 6800 - DNA, 21 bp, synthetic construct
  misc_feature 1..21: note = Synthetic construct
  source 1..21: mol_type = other DNA
cctggcgccaattaccgcgac

SEQ ID NO: 6801 - DNA, 21 bp, synthetic construct
  misc_feature 1..21: note = Synthetic construct
  source 1..21: mol_type = other DNA
ctggcgccaattaccgcgacg

SEQ ID NO: 6802 - DNA, 21 bp, synthetic construct
  misc_feature 1..21: note = Synthetic construct
  source 1..21: mol_type = other DNA
tggcgccaattaccgcgacga

SEQ ID NO: 6803 - DNA, 21 bp, synthetic construct
  misc_feature 1..21: note = Synthetic construct
  source 1..21: mol_type = other DNA
ggcgccaattaccgcgacgag

SEQ ID NO: 6804 - DNA, 21 bp, synthetic construct
  misc_feature 1..21: note = Synthetic construct
  source 1..21: mol_type = other DNA
gcgccaattaccgcgacgagc

SEQ ID NO: 6805 - DNA, 21 bp, synthetic construct
  misc_feature 1..21: note = Synthetic construct
  source 1..21: mol_type = other DNA
cgccaattaccgcgacgagcg

SEQ ID NO: 6806 - DNA, 21 bp, synthetic construct
  misc_feature 1..21: note = Synthetic construct
  source 1..21: mol_type = other DNA
gccaattaccgcgacgagcgg

SEQ ID NO: 6807 - DNA, 21 bp, synthetic construct
  misc_feature 1..21: note = Synthetic construct
  source 1..21: mol_type = other DNA
ccaattaccgcgacgagcggc

SEQ ID NO: 6808 - DNA, 21 bp, synthetic construct
  misc_feature 1..21: note = Synthetic construct
  source 1..21: mol_type = other DNA
caattaccgcgacgagcggca

SEQ ID NO: 6809 - DNA, 21 bp, synthetic construct
  misc_feature 1..21: note = Synthetic construct
  source 1..21: mol_type = other DNA
aattaccgcgacgagcggcag

SEQ ID NO: 6810 - DNA, 21 bp, synthetic construct
  misc_feature 1..21: note = Synthetic construct
  source 1..21: mol_type = other DNA
attaccgcgacgagcggcagt

SEQ ID NO: 6811 - DNA, 21 bp, synthetic construct
  misc_feature 1..21: note = Synthetic construct
  source 1..21: mol_type = other DNA
ttaccgcgacgagcggcagtg

SEQ ID NO: 6812 - DNA, 21 bp, synthetic construct
  misc_feature 1..21: note = Synthetic construct
  source 1..21: mol_type = other DNA
taccgcgacgagcggcagtgt

SEQ ID NO: 6813 - DNA, 21 bp, synthetic construct
  misc_feature 1..21: note = Synthetic construct
  source 1..21: mol_type = other DNA
accgcgacgagcggcagtgta

SEQ ID NO: 6814 - DNA, 21 bp, synthetic construct
  misc_feature 1..21: note = Synthetic construct
  source 1..21: mol_type = other DNA
ccgcgacgagcggcagtgtac

SEQ ID NO: 6815 - DNA, 21 bp, synthetic construct
  misc_feature 1..21: note = Synthetic construct
  source 1..21: mol_type = other DNA
cgcgacgagcggcagtgtacg

SEQ ID NO: 6816 - DNA, 21 bp, synthetic construct
  misc_feature 1..21: note = Synthetic construct
  source 1..21: mol_type = other DNA
gcgacgagcggcagtgtacgc

SEQ ID NO: 6817 - DNA, 21 bp, synthetic construct
  misc_feature 1..21: note = Synthetic construct
  source 1..21: mol_type = other DNA
cgacgagcggcagtgtacgcc

SEQ ID NO: 6818 - DNA, 21 bp, synthetic construct
  misc_feature 1..21: note = Synthetic construct
  source 1..21: mol_type = other DNA
gacgagcggcagtgtacgcct

SEQ ID NO: 6819 - DNA, 21 bp, synthetic construct
  misc_feature 1..21: note = Synthetic construct
  source 1..21: mol_type = other DNA
acgagcggcagtgtacgcctt

SEQ ID NO: 6820 - DNA, 21 bp, synthetic construct
  misc_feature 1..21: note = Synthetic construct
  source 1..21: mol_type = other DNA
cgagcggcagtgtacgccttc

SEQ ID NO: 6821 - DNA, 21 bp, synthetic construct
  misc_feature 1..21: note = Synthetic construct
  source 1..21: mol_type = other DNA
gagcggcagtgtacgccttca

SEQ ID NO: 6822 - DNA, 21 bp, synthetic construct
  misc_feature 1..21: note = Synthetic construct
  source 1..21: mol_type = other DNA
agcggcagtgtacgccttcac

SEQ ID NO: 6823 - DNA, 21 bp, synthetic construct
  misc_feature 1..21: note = Synthetic construct
  source 1..21: mol_type = other DNA
gcggcagtgtacgccttcacg

SEQ ID NO: 6824 - DNA, 21 bp, synthetic construct
  misc_feature 1..21: note = Synthetic construct
  source 1..21: mol_type = other DNA
cggcagtgtacgccttcacga

SEQ ID NO: 6825 - DNA, 21 bp, synthetic construct
  misc_feature 1..21: note = Synthetic construct
  source 1..21: mol_type = other DNA
ggcagtgtacgccttcacgag

SEQ ID NO: 6826 - DNA, 21 bp, synthetic construct
  misc_feature 1..21: note = Synthetic construct
  source 1..21: mol_type = other DNA
gcagtgtacgccttcacgagc

SEQ ID NO: 6827 - DNA, 21 bp, synthetic construct
  misc_feature 1..21: note = Synthetic construct
  source 1..21: mol_type = other DNA
cagtgtacgccttcacgagcg

SEQ ID NO: 6828 - DNA, 21 bp, synthetic construct
  misc_feature 1..21: note = Synthetic construct
  source 1..21: mol_type = other DNA
agtgtacgccttcacgagcgc

SEQ ID NO: 6829 - DNA, 21 bp, synthetic construct
  misc_feature 1..21: note = Synthetic construct
  source 1..21: mol_type = other DNA
gtgtacgccttcacgagcgca

SEQ ID NO: 6830 - DNA, 21 bp, synthetic construct
  misc_feature 1..21: note = Synthetic construct
  source 1..21: mol_type = other DNA
tgtacgccttcacgagcgcaa

SEQ ID NO: 6831 - DNA, 21 bp, synthetic construct
  misc_feature 1..21: note = Synthetic construct
  source 1..21: mol_type = other DNA
gtacgccttcacgagcgcaat

SEQ ID NO: 6832 - DNA, 21 bp, synthetic construct
  misc_feature 1..21: note = Synthetic construct
  source 1..21: mol_type = other DNA
tacgccttcacgagcgcaatg

SEQ ID NO: 6833 - DNA, 21 bp, synthetic construct
  misc_feature 1..21: note = Synthetic construct
  source 1..21: mol_type = other DNA
acgccttcacgagcgcaatgg

SEQ ID NO: 6834 - DNA, 21 bp, synthetic construct
  misc_feature 1..21: note = Synthetic construct
  source 1..21: mol_type = other DNA
cgccttcacgagcgcaatggt

SEQ ID NO: 6835 - DNA, 21 bp, synthetic construct
  misc_feature 1..21: note = Synthetic construct
  source 1..21: mol_type = other DNA
gccttcacgagcgcaatggtt

SEQ ID NO: 6836 - DNA, 21 bp, synthetic construct
  misc_feature 1..21: note = Synthetic construct
  source 1..21: mol_type = other DNA
ccttcacgagcgcaatggttt

SEQ ID NO: 6837 - DNA, 21 bp, synthetic construct
  misc_feature 1..21: note = Synthetic construct
  source 1..21: mol_type = other DNA
cttcacgagcgcaatggtttg

SEQ ID NO: 6838 - DNA, 21 bp, synthetic construct
  misc_feature 1..21: note = Synthetic construct
  source 1..21: mol_type = other DNA
ttcacgagcgcaatggtttgc

SEQ ID NO: 6839 - DNA, 21 bp, synthetic construct
  misc_feature 1..21: note = Synthetic construct
  source 1..21: mol_type = other DNA
tcacgagcgcaatggtttgcg

SEQ ID NO: 6840 - DNA, 21 bp, synthetic construct
  misc_feature 1..21: note = Synthetic construct
  source 1..21: mol_type = other DNA
cacgagcgcaatggtttgcgt

SEQ ID NO: 6841 - DNA, 21 bp, synthetic construct
  misc_feature 1..21: note = Synthetic construct
  source 1..21: mol_type = other DNA
acgagcgcaatggtttgcgtc

SEQ ID NO: 6842 - DNA, 21 bp, synthetic construct
  misc_feature 1..21: note = Synthetic construct
  source 1..21: mol_type = other DNA
cgagcgcaatggtttgcgtcg

SEQ ID NO: 6843 - DNA, 21 bp, synthetic construct
  misc_feature 1..21: note = Synthetic construct
  source 1..21: mol_type = other DNA
gagcgcaatggtttgcgtcgc

SEQ ID NO: 6844 - DNA, 21 bp, synthetic construct
  misc_feature 1..21: note = Synthetic construct
  source 1..21: mol_type = other DNA
agcgcaatggtttgcgtcgcg

SEQ ID NO: 6845 - DNA, 21 bp, synthetic construct
  misc_feature 1..21: note = Synthetic construct
  source 1..21: mol_type = other DNA
gcgcaatggtttgcgtcgcga

SEQ ID NO: 6846 - DNA, 21 bp, synthetic construct
  misc_feature 1..21: note = Synthetic construct
  source 1..21: mol_type = other DNA
cgcaatggtttgcgtcgcgag

SEQ ID NO: 6847 - DNA, 21 bp, synthetic construct
  misc_feature 1..21: note = Synthetic construct
  source 1..21: mol_type = other DNA
gcaatggtttgcgtcgcgagt

SEQ ID NO: 6848 - DNA, 21 bp, synthetic construct
  misc_feature 1..21: note = Synthetic construct
  source 1..21: mol_type = other DNA
caatggtttgcgtcgcgagtt

SEQ ID NO: 6849 - DNA, 21 bp, synthetic construct
  misc_feature 1..21: note = Synthetic construct
  source 1..21: mol_type = other DNA
aatggtttgcgtcgcgagttg

SEQ ID NO: 6850 - DNA, 21 bp, synthetic construct
  misc_feature 1..21: note = Synthetic construct
  source 1..21: mol_type = other DNA
atggtttgcgtcgcgagttgt

SEQ ID NO: 6851 - DNA, 21 bp, synthetic construct
  misc_feature 1..21: note = Synthetic construct
  source 1..21: mol_type = other DNA
tggtttgcgtcgcgagttgtg

SEQ ID NO: 6852 - DNA, 21 bp, synthetic construct
  misc_feature 1..21: note = Synthetic construct
  source 1..21: mol_type = other DNA
ggtttgcgtcgcgagttgtga

SEQ ID NO: 6853 - DNA, 21 bp, synthetic construct
  misc_feature 1..21: note = Synthetic construct
  source 1..21: mol_type = other DNA
gtttgcgtcgcgagttgtgag

SEQ ID NO: 6854 - DNA, 21 bp, synthetic construct
  misc_feature 1..21: note = Synthetic construct
  source 1..21: mol_type = other DNA
tttgcgtcgcgagttgtgagg

SEQ ID NO: 6855 - DNA, 21 bp, synthetic construct
  misc_feature 1..21: note = Synthetic construct
  source 1..21: mol_type = other DNA
ttgcgtcgcgagttgtgaggc

SEQ ID NO: 6856 - DNA, 21 bp, synthetic construct
  misc_feature 1..21: note = Synthetic construct
  source 1..21: mol_type = other DNA
tgcgtcgcgagttgtgaggct

SEQ ID NO: 6857 - DNA, 21 bp, synthetic construct
  misc_feature 1..21: note = Synthetic construct
  source 1..21: mol_type = other DNA
gcgtcgcgagttgtgaggctg

SEQ ID NO: 6858 - DNA, 21 bp, synthetic construct
  misc_feature 1..21: note = Synthetic construct
  source 1..21: mol_type = other DNA
cgtcgcgagttgtgaggctgt

SEQ ID NO: 6859 - DNA, 21 bp, synthetic construct
  misc_feature 1..21: note = Synthetic construct
  source 1..21: mol_type = other DNA
gtcgcgagttgtgaggctgtc

SEQ ID NO: 6860 - DNA, 21 bp, synthetic construct
  misc_feature 1..21: note = Synthetic construct
  source 1..21: mol_type = other DNA
tcgcgagttgtgaggctgtcg

SEQ ID NO: 6861 - DNA, 21 bp, synthetic construct
  misc_feature 1..21: note = Synthetic construct
  source 1..21: mol_type = other DNA
cgcgagttgtgaggctgtcga

SEQ ID NO: 6862 - DNA, 21 bp, synthetic construct
  misc_feature 1..21: note = Synthetic construct
  source 1..21: mol_type = other DNA
gcgagttgtgaggctgtcgac

SEQ ID NO: 6863 - DNA, 21 bp, synthetic construct
  misc_feature 1..21: note = Synthetic construct
  source 1..21: mol_type = other DNA
cgagttgtgaggctgtcgacc

SEQ ID NO: 6864 - DNA, 21 bp, synthetic construct
  misc_feature 1..21: note = Synthetic construct
  source 1..21: mol_type = other DNA
gagttgtgaggctgtcgacct

SEQ ID NO: 6865 - DNA, 21 bp, synthetic construct
  misc_feature 1..21: note = Synthetic construct
  source 1..21: mol_type = other DNA
agttgtgaggctgtcgacctg

SEQ ID NO: 6866 - DNA, 21 bp, synthetic construct
  misc_feature 1..21: note = Synthetic construct
  source 1..21: mol_type = other DNA
gttgtgaggctgtcgacctgg

SEQ ID NO: 6867 - DNA, 21 bp, synthetic construct
  misc_feature 1..21: note = Synthetic construct
  source 1..21: mol_type = other DNA
ttgtgaggctgtcgacctggc

SEQ ID NO: 6868 - DNA, 21 bp, synthetic construct
  misc_feature 1..21: note = Synthetic construct
  source 1..21: mol_type = other DNA
tgtgaggctgtcgacctggcc

SEQ ID NO: 6869 - DNA, 21 bp, synthetic construct
  misc_feature 1..21: note = Synthetic construct
  source 1..21: mol_type = other DNA
gtgaggctgtcgacctggcct

SEQ ID NO: 6870 - DNA, 21 bp, synthetic construct
  misc_feature 1..21: note = Synthetic construct
  source 1..21: mol_type = other DNA
tgaggctgtcgacctggcctc

SEQ ID NO: 6871 - DNA, 21 bp, synthetic construct
  misc_feature 1..21: note = Synthetic construct
  source 1..21: mol_type = other DNA
gaggctgtcgacctggcctct

SEQ ID NO: 6872 - DNA, 21 bp, synthetic construct
  misc_feature 1..21: note = Synthetic construct
  source 1..21: mol_type = other DNA
aggctgtcgacctggcctctg

SEQ ID NO: 6873 - DNA, 21 bp, synthetic construct
  misc_feature 1..21: note = Synthetic construct
  source 1..21: mol_type = other DNA
ggctgtcgacctggcctctgc

SEQ ID NO: 6874 - DNA, 21 bp, synthetic construct
  misc_feature 1..21: note = Synthetic construct
  source 1..21: mol_type = other DNA
gctgtcgacctggcctctgct

SEQ ID NO: 6875 - DNA, 21 bp, synthetic construct
  misc_feature 1..21: note = Synthetic construct
  source 1..21: mol_type = other DNA
ctgtcgacctggcctctgcta

SEQ ID NO: 6876 - DNA, 21 bp, synthetic construct
  misc_feature 1..21: note = Synthetic construct
  source 1..21: mol_type = other DNA
tgtcgacctggcctctgctaa

SEQ ID NO: 6877 - DNA, 21 bp, synthetic construct
  misc_feature 1..21: note = Synthetic construct
  source 1..21: mol_type = other DNA
gtcgacctggcctctgctaaa

SEQ ID NO: 6878 - DNA, 21 bp, synthetic construct
  misc_feature 1..21: note = Synthetic construct
  source 1..21: mol_type = other DNA
tcgacctggcctctgctaaag

SEQ ID NO: 6879 - DNA, 21 bp, synthetic construct
  misc_feature 1..21: note = Synthetic construct
  source 1..21: mol_type = other DNA
cgacctggcctctgctaaagc

SEQ ID NO: 6880 - DNA, 21 bp, synthetic construct
  misc_feature 1..21: note = Synthetic construct
  source 1..21: mol_type = other DNA
gacctggcctctgctaaagca

SEQ ID NO: 6881 - DNA, 21 bp, synthetic construct
  misc_feature 1..21: note = Synthetic construct
  source 1..21: mol_type = other DNA
acctggcctctgctaaagcaa

SEQ ID NO: 6882 - DNA, 21 bp, synthetic construct
  misc_feature 1..21: note = Synthetic construct
  source 1..21: mol_type = other DNA
cctggcctctgctaaagcaac

SEQ ID NO: 6883 - DNA, 21 bp, synthetic construct
  misc_feature 1..21: note = Synthetic construct
  source 1..21: mol_type = other DNA
ctggcctctgctaaagcaaca

SEQ ID NO: 6884 - DNA, 21 bp, synthetic construct
  misc_feature 1..21: note = Synthetic construct
  source 1..21: mol_type = other DNA
tggcctctgctaaagcaacac

SEQ ID NO: 6885 - DNA, 21 bp, synthetic construct
  misc_feature 1..21: note = Synthetic construct
  source 1..21: mol_type = other DNA
ggcctctgctaaagcaacacc

SEQ ID NO: 6886 - DNA, 21 bp, synthetic construct
  misc_feature 1..21: note = Synthetic construct
  source 1..21: mol_type = other DNA
gcctctgctaaagcaacacca

SEQ ID NO: 6887 - DNA, 21 bp, synthetic construct
  misc_feature 1..21: note = Synthetic construct
  source 1..21: mol_type = other DNA
cctctgctaaagcaacaccaa

SEQ ID NO: 6888 - DNA, 21 bp, synthetic construct
  misc_feature 1..21: note = Synthetic construct
  source 1..21: mol_type = other DNA
ctctgctaaagcaacaccaag

SEQ ID NO: 6889 - DNA, 21 bp, synthetic construct
  misc_feature 1..21: note = Synthetic construct
  source 1..21: mol_type = other DNA
tctgctaaagcaacaccaagg

SEQ ID NO: 6890 - DNA, 21 bp, synthetic construct
  misc_feature 1..21: note = Synthetic construct
  source 1..21: mol_type = other DNA
ctgctaaagcaacaccaaggt

SEQ ID NO: 6891 - DNA, 21 bp, synthetic construct
  misc_feature 1..21: note = Synthetic construct
  source 1..21: mol_type = other DNA
tgctaaagcaacaccaaggtt

SEQ ID NO: 6892 - DNA, 21 bp, synthetic construct
  misc_feature 1..21: note = Synthetic construct
  source 1..21: mol_type = other DNA
gctaaagcaacaccaaggtta

SEQ ID NO: 6893 - DNA, 21 bp, synthetic construct
  misc_feature 1..21: note = Synthetic construct
  source 1..21: mol_type = other DNA
ctaaagcaacaccaaggttaa

SEQ ID NO: 6894 - DNA, 21 bp, synthetic construct
  misc_feature 1..21: note = Synthetic construct
  source 1..21: mol_type = other DNA
taaagcaacaccaaggttaaa

SEQ ID NO: 6895 - DNA, 21 bp, synthetic construct
  misc_feature 1..21: note = Synthetic construct
  source 1..21: mol_type = other DNA
aaagcaacaccaaggttaaaa

SEQ ID NO: 6896 - DNA, 21 bp, synthetic construct
  misc_feature 1..21: note = Synthetic construct
  source 1..21: mol_type = other DNA
aagcaacaccaaggttaaaat

SEQ ID NO: 6897 - DNA, 21 bp, synthetic construct
  misc_feature 1..21: note = Synthetic construct
  source 1..21: mol_type = other DNA
agcaacaccaaggttaaaatt

SEQ ID NO: 6898 - DNA, 21 bp, synthetic construct
  misc_feature 1..21: note = Synthetic construct
  source 1..21: mol_type = other DNA
gcaacaccaaggttaaaatta

SEQ ID NO: 6899 - DNA, 21 bp, synthetic construct
  misc_feature 1..21: note = Synthetic construct
  source 1..21: mol_type = other DNA
caacaccaaggttaaaattac

SEQ ID NO: 6900 - DNA, 21 bp, synthetic construct
  misc_feature 1..21: note = Synthetic construct
  source 1..21: mol_type = other DNA
aacaccaaggttaaaattacc

SEQ ID NO: 6901 - DNA, 21 bp, synthetic construct
  misc_feature 1..21: note = Synthetic construct
  source 1..21: mol_type = other DNA
acaccaaggttaaaattaccc

SEQ ID NO: 6902 - DNA, 21 bp, synthetic construct
  misc_feature 1..21: note = Synthetic construct
  source 1..21: mol_type = other DNA
caccaaggttaaaattaccct

SEQ ID NO: 6903 - DNA, 21 bp, synthetic construct
  misc_feature 1..21: note = Synthetic construct
  source 1..21: mol_type = other DNA
accaaggttaaaattaccctg

SEQ ID NO: 6904 - DNA, 21 bp, synthetic construct
  misc_feature 1..21: note = Synthetic construct
  source 1..21: mol_type = other DNA
ccaaggttaaaattaccctgg

SEQ ID NO: 6905 - DNA, 21 bp, synthetic construct
  misc_feature 1..21: note = Synthetic construct
  source 1..21: mol_type = other DNA
caaggttaaaattaccctggg

SEQ ID NO: 6906 - DNA, 21 bp, synthetic construct
  misc_feature 1..21: note = Synthetic construct
  source 1..21: mol_type = other DNA
aaggttaaaattaccctgggt

SEQ ID NO: 6907 - DNA, 21 bp, synthetic construct
  misc_feature 1..21: note = Synthetic construct
  source 1..21: mol_type = other DNA
aggttaaaattaccctgggtg

SEQ ID NO: 6908 - DNA, 21 bp, synthetic construct
  misc_feature 1..21: note = Synthetic construct
  source 1..21: mol_type = other DNA
ggttaaaattaccctgggtga

SEQ ID NO: 6909 - DNA, 21 bp, synthetic construct
  misc_feature 1..21: note = Synthetic construct
  source 1..21: mol_type = other DNA
gttaaaattaccctgggtgac

SEQ ID NO: 6910 - DNA, 21 bp, synthetic construct
  misc_feature 1..21: note = Synthetic construct
  source 1..21: mol_type = other DNA
ttaaaattaccctgggtgacc

SEQ ID NO: 6911 - DNA, 21 bp, synthetic construct
  misc_feature 1..21: note = Synthetic construct
  source 1..21: mol_type = other DNA
taaaattaccctgggtgacct

SEQ ID NO: 6912 - DNA, 21 bp, synthetic construct
  misc_feature 1..21: note = Synthetic construct
  source 1..21: mol_type = other DNA
aaaattaccctgggtgacctt

SEQ ID NO: 6913 - DNA, 21 bp, synthetic construct
  misc_feature 1..21: note = Synthetic construct
  source 1..21: mol_type = other DNA
aaattaccctgggtgaccttt

SEQ ID NO: 6914 - DNA, 21 bp, synthetic construct
  misc_feature 1..21: note = Synthetic construct
  source 1..21: mol_type = other DNA
aattaccctgggtgacctttt

SEQ ID NO: 6915 - DNA, 21 bp, synthetic construct
  misc_feature 1..21: note = Synthetic construct
  source 1..21: mol_type = other DNA
attaccctgggtgaccttttg

SEQ ID NO: 6916 - DNA, 21 bp, synthetic construct
  misc_feature 1..21: note = Synthetic construct
  source 1..21: mol_type = other DNA
ttaccctgggtgaccttttgc

SEQ ID NO: 6917 - DNA, 21 bp, synthetic construct
  misc_feature 1..21: note = Synthetic construct
  source 1..21: mol_type = other DNA
taccctgggtgaccttttgca

SEQ ID NO: 6918 - DNA, 21 bp, synthetic construct
  misc_feature 1..21: note = Synthetic construct
  source 1..21: mol_type = other DNA
accctgggtgaccttttgcag

SEQ ID NO: 6919 - DNA, 21 bp, synthetic construct
  misc_feature 1..21: note = Synthetic construct
  source 1..21: mol_type = other DNA
ccctgggtgaccttttgcagg

SEQ ID NO: 6920 - DNA, 21 bp, synthetic construct
  misc_feature 1..21: note = Synthetic construct
  source 1..21: mol_type = other DNA
cctgggtgaccttttgcagga

SEQ ID NO: 6921 - DNA, 21 bp, synthetic construct
  misc_feature 1..21: note = Synthetic construct
  source 1..21: mol_type = other DNA
ctgggtgaccttttgcaggac

SEQ ID NO: 6922 - DNA, 21 bp, synthetic construct
  misc_feature 1..21: note = Synthetic construct
  source 1..21: mol_type = other DNA
tgggtgaccttttgcaggact

SEQ ID NO: 6923 - DNA, 21 bp, synthetic construct
  misc_feature 1..21: note = Synthetic construct
  source 1..21: mol_type = other DNA
gggtgaccttttgcaggactt

SEQ ID NO: 6924 - DNA, 21 bp, synthetic construct
  misc_feature 1..21: note = Synthetic construct
  source 1..21: mol_type = other DNA
ggtgaccttttgcaggacttc

SEQ ID NO: 6925 - DNA, 21 bp, synthetic construct
  misc_feature 1..21: note = Synthetic construct
  source 1..21: mol_type = other DNA
gtgaccttttgcaggacttcg

SEQ ID NO: 6926 - DNA, 21 bp, synthetic construct
  misc_feature 1..21: note = Synthetic construct
  source 1..21: mol_type = other DNA
tgaccttttgcaggacttcgg

SEQ ID NO: 6927 - DNA, 21 bp, synthetic construct
  misc_feature 1..21: note = Synthetic construct
  source 1..21: mol_type = other DNA
gaccttttgcaggacttcggt

SEQ ID NO: 6928 - DNA, 21 bp, synthetic construct
  misc_feature 1..21: note = Synthetic construct
  source 1..21: mol_type = other DNA
accttttgcaggacttcggtc

SEQ ID NO: 6929 - DNA, 21 bp, synthetic construct
  misc_feature 1..21: note = Synthetic construct
  source 1..21: mol_type = other DNA
ccttttgcaggacttcggtcg

SEQ ID NO: 6930 - DNA, 21 bp, synthetic construct
  misc_feature 1..21: note = Synthetic construct
  source 1..21: mol_type = other DNA
cttttgcaggacttcggtcga

SEQ ID NO: 6931 - DNA, 21 bp, synthetic construct
  misc_feature 1..21: note = Synthetic construct
  source 1..21: mol_type = other DNA
ttttgcaggacttcggtcgac

SEQ ID NO: 6932 - DNA, 21 bp, synthetic construct
  misc_feature 1..21: note = Synthetic construct
  source 1..21: mol_type = other DNA
tttgcaggacttcggtcgacg

SEQ ID NO: 6933 - DNA, 21 bp, synthetic construct
  misc_feature 1..21: note = Synthetic construct
  source 1..21: mol_type = other DNA
ttgcaggacttcggtcgacgc

SEQ ID NO: 6934 - DNA, 21 bp, synthetic construct
  misc_feature 1..21: note = Synthetic construct
  source 1..21: mol_type = other DNA
tgcaggacttcggtcgacgcc

SEQ ID NO: 6935 - DNA, 21 bp, synthetic construct
  misc_feature 1..21: note = Synthetic construct
  source 1..21: mol_type = other DNA
gcaggacttcggtcgacgccc

SEQ ID NO: 6936 - DNA, 21 bp, synthetic construct
  misc_feature 1..21: note = Synthetic construct
  source 1..21: mol_type = other DNA
caggacttcggtcgacgcccg

SEQ ID NO: 6937 - DNA, 21 bp, synthetic construct
  misc_feature 1..21: note = Synthetic construct
  source 1..21: mol_type = other DNA
aggacttcggtcgacgcccgg

SEQ ID NO: 6938 - DNA, 21 bp, synthetic construct
  misc_feature 1..21: note = Synthetic construct
  source 1..21: mol_type = other DNA
ggacttcggtcgacgcccggt

SEQ ID NO: 6939 - DNA, 21 bp, synthetic construct
  misc_feature 1..21: note = Synthetic construct
  source 1..21: mol_type = other DNA
gacttcggtcgacgcccggtt

SEQ ID NO: 6940 - DNA, 21 bp, synthetic construct
  misc_feature 1..21: note = Synthetic construct
  source 1..21: mol_type = other DNA
acttcggtcgacgcccggttc

SEQ ID NO: 6941 - DNA, 21 bp, synthetic construct
  misc_feature 1..21: note = Synthetic construct
  source 1..21: mol_type = other DNA
cttcggtcgacgcccggttcg

SEQ ID NO: 6942 - DNA, 21 bp, synthetic construct
  misc_feature 1..21: note = Synthetic construct
  source 1..21: mol_type = other DNA
ttcggtcgacgcccggttcgc

SEQ ID NO: 6943 - DNA, 21 bp, synthetic construct
  misc_feature 1..21: note = Synthetic construct
  source 1..21: mol_type = other DNA
tcggtcgacgcccggttcgca

SEQ ID NO: 6944 - DNA, 21 bp, synthetic construct
  misc_feature 1..21: note = Synthetic construct
  source 1..21: mol_type = other DNA
cggtcgacgcccggttcgcaa

SEQ ID NO: 6945 - DNA, 21 bp, synthetic construct
  misc_feature 1..21: note = Synthetic construct
  source 1..21: mol_type = other DNA
ggtcgacgcccggttcgcaac

SEQ ID NO: 6946 - DNA, 21 bp, synthetic construct
  misc_feature 1..21: note = Synthetic construct
  source 1..21: mol_type = other DNA
gtcgacgcccggttcgcaacg

SEQ ID NO: 6947 - DNA, 21 bp, synthetic construct
  misc_feature 1..21: note = Synthetic construct
  source 1..21: mol_type = other DNA
tcgacgcccggttcgcaacgt

SEQ ID NO: 6948 - DNA, 21 bp, synthetic construct
  misc_feature 1..21: note = Synthetic construct
  source 1..21: mol_type = other DNA
cgacgcccggttcgcaacgtt

SEQ ID NO: 6949 - DNA, 21 bp, synthetic construct
  misc_feature 1..21: note = Synthetic construct
  source 1..21: mol_type = other DNA
gacgcccggttcgcaacgttc

SEQ ID NO: 6950 - DNA, 21 bp, synthetic construct
  misc_feature 1..21: note = Synthetic construct
  source 1..21: mol_type = other DNA
acgcccggttcgcaacgttct

SEQ ID NO: 6951 - DNA, 21 bp, synthetic construct
  misc_feature 1..21: note = Synthetic construct
  source 1..21: mol_type = other DNA
cgcccggttcgcaacgttctg

SEQ ID NO: 6952 - DNA, 21 bp, synthetic construct
  misc_feature 1..21: note = Synthetic construct
  source 1..21: mol_type = other DNA
gcccggttcgcaacgttctgc

SEQ ID NO: 6953 - DNA, 21 bp, synthetic construct
  misc_feature 1..21: note = Synthetic construct
  source 1..21: mol_type = other DNA
cccggttcgcaacgttctgcg

SEQ ID NO: 6954 - DNA, 21 bp, synthetic construct
  misc_feature 1..21: note = Synthetic construct
  source 1..21: mol_type = other DNA
ccggttcgcaacgttctgcgg

SEQ ID NO: 6955 - DNA, 21 bp, synthetic construct
  misc_feature 1..21: note = Synthetic construct
  source 1..21: mol_type = other DNA
cggttcgcaacgttctgcggc

SEQ ID NO: 6956 - DNA, 21 bp, synthetic construct
  misc_feature 1..21: note = Synthetic construct
  source 1..21: mol_type = other DNA
ggttcgcaacgttctgcggca

SEQ ID NO: 6957 - DNA, 21 bp, synthetic construct
  misc_feature 1..21: note = Synthetic construct
  source 1..21: mol_type = other DNA
gttcgcaacgttctgcggcac

SEQ ID NO: 6958 - DNA, 21 bp, synthetic construct
  misc_feature 1..21: note = Synthetic construct
  source 1..21: mol_type = other DNA
ttcgcaacgttctgcggcact

SEQ ID NO: 6959 - DNA, 21 bp, synthetic construct
  misc_feature 1..21: note = Synthetic construct
  source 1..21: mol_type = other DNA
tcgcaacgttctgcggcactt

SEQ ID NO: 6960 - DNA, 21 bp, synthetic construct
  misc_feature 1..21: note = Synthetic construct
  source 1..21: mol_type = other DNA
cgcaacgttctgcggcacttc

SEQ ID NO: 6961 - DNA, 21 bp, synthetic construct
  misc_feature 1..21: note = Synthetic construct
  source 1..21: mol_type = other DNA
gcaacgttctgcggcacttcg

SEQ ID NO: 6962 - DNA, 21 bp, synthetic construct
  misc_feature 1..21: note = Synthetic construct
  source 1..21: mol_type = other DNA
caacgttctgcggcacttcga

SEQ ID NO: 6963 - DNA, 21 bp, synthetic construct
  misc_feature 1..21: note = Synthetic construct
  source 1..21: mol_type = other DNA
aacgttctgcggcacttcgat

SEQ ID NO: 6964 - DNA, 21 bp, synthetic construct
  misc_feature 1..21: note = Synthetic construct
  source 1..21: mol_type = other DNA
acgttctgcggcacttcgatg

SEQ ID NO: 6965 - DNA, 21 bp, synthetic construct
  misc_feature 1..21: note = Synthetic construct
  source 1..21: mol_type = other DNA
cgttctgcggcacttcgatgt

SEQ ID NO: 6966 - DNA, 21 bp, synthetic construct
  misc_feature 1..21: note = Synthetic construct
  source 1..21: mol_type = other DNA
gttctgcggcacttcgatgta

SEQ ID NO: 6967 - DNA, 21 bp, synthetic construct
  misc_feature 1..21: note = Synthetic construct
  source 1..21: mol_type = other DNA
ttctgcggcacttcgatgtaa

SEQ ID NO: 6968 - DNA, 21 bp, synthetic construct
  misc_feature 1..21: note = Synthetic construct
  source 1..21: mol_type = other DNA
tctgcggcacttcgatgtaag

SEQ ID NO: 6969 - DNA, 21 bp, synthetic construct
  misc_feature 1..21: note = Synthetic construct
  source 1..21: mol_type = other DNA
ctgcggcacttcgatgtaagt

SEQ ID NO: 6970 - DNA, 21 bp, synthetic construct
  misc_feature 1..21: note = Synthetic construct
  source 1..21: mol_type = other DNA
tgcggcacttcgatgtaagtc

SEQ ID NO: 6971 - DNA, 21 bp, synthetic construct
  misc_feature 1..21: note = Synthetic construct
  source 1..21: mol_type = other DNA
gcggcacttcgatgtaagtca

SEQ ID NO: 6972 - DNA, 21 bp, synthetic construct
  misc_feature 1..21: note = Synthetic construct
  source 1..21: mol_type = other DNA
cggcacttcgatgtaagtcaa

SEQ ID NO: 6973 - DNA, 21 bp, synthetic construct
  misc_feature 1..21: note = Synthetic construct
  source 1..21: mol_type = other DNA
ggcacttcgatgtaagtcaag

SEQ ID NO: 6974 - DNA, 21 bp, synthetic construct
  misc_feature 1..21: note = Synthetic construct
  source 1..21: mol_type = other DNA
gcacttcgatgtaagtcaagt

SEQ ID NO: 6975 - DNA, 21 bp, synthetic construct
  misc_feature 1..21: note = Synthetic construct
  source 1..21: mol_type = other DNA
cacttcgatgtaagtcaagtt

SEQ ID NO: 6976 - DNA, 21 bp, synthetic construct
  misc_feature 1..21: note = Synthetic construct
  source 1..21: mol_type = other DNA
acttcgatgtaagtcaagttt

SEQ ID NO: 6977 - DNA, 21 bp, synthetic construct
  misc_feature 1..21: note = Synthetic construct
  source 1..21: mol_type = other DNA
cttcgatgtaagtcaagtttt

SEQ ID NO: 6978 - DNA, 21 bp, synthetic construct
  misc_feature 1..21: note = Synthetic construct
  source 1..21: mol_type = other DNA
ttcgatgtaagtcaagttttg

SEQ ID NO: 6979 - DNA, 21 bp, synthetic construct
  misc_feature 1..21: note = Synthetic construct
  source 1..21: mol_type = other DNA
tcgatgtaagtcaagttttgg

SEQ ID NO: 6980 - DNA, 21 bp, synthetic construct
  misc_feature 1..21: note = Synthetic construct
  source 1..21: mol_type = other DNA
cgatgtaagtcaagttttggc

SEQ ID NO: 6981 - DNA, 21 bp, synthetic construct
  misc_feature 1..21: note = Synthetic construct
  source 1..21: mol_type = other DNA
gatgtaagtcaagttttggct

SEQ ID NO: 6982 - DNA, 21 bp, synthetic construct
  misc_feature 1..21: note = Synthetic construct
  source 1..21: mol_type = other DNA
atgtaagtcaagttttggctt

SEQ ID NO: 6983 - DNA, 21 bp, synthetic construct
  misc_feature 1..21: note = Synthetic construct
  source 1..21: mol_type = other DNA
tgtaagtcaagttttggctta

SEQ ID NO: 6984 - DNA, 21 bp, synthetic construct
  misc_feature 1..21: note = Synthetic construct
  source 1..21: mol_type = other DNA
gtaagtcaagttttggcttac

SEQ ID NO: 6985 - DNA, 21 bp, synthetic construct
  misc_feature 1..21: note = Synthetic construct
  source 1..21: mol_type = other DNA
taagtcaagttttggcttaca

SEQ ID NO: 6986 - DNA, 21 bp, synthetic construct
  misc_feature 1..21: note = Synthetic construct
  source 1..21: mol_type = other DNA
aagtcaagttttggcttacag

SEQ ID NO: 6987 - DNA, 21 bp, synthetic construct
  misc_feature 1..21: note = Synthetic construct
  source 1..21: mol_type = other DNA
agtcaagttttggcttacagg

SEQ ID NO: 6988 - DNA, 21 bp, synthetic construct
  misc_feature 1..21: note = Synthetic construct
  source 1..21: mol_type = other DNA
gtcaagttttggcttacaggg

SEQ ID NO: 6989 - DNA, 21 bp, synthetic construct
  misc_feature 1..21: note = Synthetic construct
  source 1..21: mol_type = other DNA
tcaagttttggcttacaggga

SEQ ID NO: 6990 - DNA, 21 bp, synthetic construct
  misc_feature 1..21: note = Synthetic construct
  source 1..21: mol_type = other DNA
caagttttggcttacagggaa

SEQ ID NO: 6991 - DNA, 21 bp, synthetic construct
  misc_feature 1..21: note = Synthetic construct
  source 1..21: mol_type = other DNA
aagttttggcttacagggaag

SEQ ID NO: 6992 - DNA, 21 bp, synthetic construct
  misc_feature 1..21: note = Synthetic construct
  source 1..21: mol_type = other DNA
agttttggcttacagggaaga

SEQ ID NO: 6993 - DNA, 21 bp, synthetic construct
  misc_feature 1..21: note = Synthetic construct
  source 1..21: mol_type = other DNA
gttttggcttacagggaagag

SEQ ID NO: 6994 - DNA, 21 bp, synthetic construct
  misc_feature 1..21: note = Synthetic construct
  source 1..21: mol_type = other DNA
ttttggcttacagggaagagg

SEQ ID NO: 6995 - DNA, 21 bp, synthetic construct
  misc_feature 1..21: note = Synthetic construct
  source 1..21: mol_type = other DNA
tttggcttacagggaagaggc

SEQ ID NO: 6996 - DNA, 21 bp, synthetic construct
  misc_feature 1..21: note = Synthetic construct
  source 1..21: mol_type = other DNA
ttggcttacagggaagaggct

SEQ ID NO: 6997 - DNA, 21 bp, synthetic construct
  misc_feature 1..21: note = Synthetic construct
  source 1..21: mol_type = other DNA
tggcttacagggaagaggctg

SEQ ID NO: 6998 - DNA, 21 bp, synthetic construct
  misc_feature 1..21: note = Synthetic construct
  source 1..21: mol_type = other DNA
ggcttacagggaagaggctgt

SEQ ID NO: 6999 - DNA, 21 bp, synthetic construct
  misc_feature 1..21: note = Synthetic construct
  source 1..21: mol_type = other DNA
gcttacagggaagaggctgta

SEQ ID NO: 7000 - DNA, 21 bp, synthetic construct
  misc_feature 1..21: note = Synthetic construct
  source 1..21: mol_type = other DNA
cttacagggaagaggctgtag

SEQ ID NO: 7001 - DNA, 21 bp, synthetic construct
  misc_feature 1..21: note = Synthetic construct
  source 1..21: mol_type = other DNA
ttacagggaagaggctgtagc

SEQ ID NO: 7002 - DNA, 21 bp, synthetic construct
  misc_feature 1..21: note = Synthetic construct
  source 1..21: mol_type = other DNA
tacagggaagaggctgtagca

SEQ ID NO: 7003 - DNA, 21 bp, synthetic construct
  misc_feature 1..21: note = Synthetic construct
  source 1..21: mol_type = other DNA
acagggaagaggctgtagcag

SEQ ID NO: 7004 - DNA, 21 bp, synthetic construct
  misc_feature 1..21: note = Synthetic construct
  source 1..21: mol_type = other DNA
cagggaagaggctgtagcagg

SEQ ID NO: 7005 - DNA, 21 bp, synthetic construct
  misc_feature 1..21: note = Synthetic construct
  source 1..21: mol_type = other DNA
agggaagaggctgtagcagga

SEQ ID NO: 7006 - DNA, 21 bp, synthetic construct
  misc_feature 1..21: note = Synthetic construct
  source 1..21: mol_type = other DNA
gggaagaggctgtagcaggag

SEQ ID NO: 7007 - DNA, 21 bp, synthetic construct
  misc_feature 1..21: note = Synthetic construct
  source 1..21: mol_type = other DNA
ggaagaggctgtagcaggagc

SEQ ID NO: 7008 - DNA, 21 bp, synthetic construct
  misc_feature 1..21: note = Synthetic construct
  source 1..21: mol_type = other DNA
gaagaggctgtagcaggagcg

SEQ ID NO: 7009 - DNA, 21 bp, synthetic construct
  misc_feature 1..21: note = Synthetic construct
  source 1..21: mol_type = other DNA
aagaggctgtagcaggagcgt

SEQ ID NO: 7010 - DNA, 21 bp, synthetic construct
  misc_feature 1..21: note = Synthetic construct
  source 1..21: mol_type = other DNA
agaggctgtagcaggagcgtg

SEQ ID NO: 7011 - DNA, 21 bp, synthetic construct
  misc_feature 1..21: note = Synthetic construct
  source 1..21: mol_type = other DNA
gaggctgtagcaggagcgtgc

SEQ ID NO: 7012 - DNA, 21 bp, synthetic construct
  misc_feature 1..21: note = Synthetic construct
  source 1..21: mol_type = other DNA
aggctgtagcaggagcgtgcg

SEQ ID NO: 7013 - DNA, 21 bp, synthetic construct
  misc_feature 1..21: note = Synthetic construct
  source 1..21: mol_type = other DNA
ggctgtagcaggagcgtgcgt

SEQ ID NO: 7014 - DNA, 21 bp, synthetic construct
  misc_feature 1..21: note = Synthetic construct
  source 1..21: mol_type = other DNA
gctgtagcaggagcgtgcgtc

SEQ ID NO: 7015 - DNA, 21 bp, synthetic construct
  misc_feature 1..21: note = Synthetic construct
  source 1..21: mol_type = other DNA
ctgtagcaggagcgtgcgtcg

SEQ ID NO: 7016 - DNA, 21 bp, synthetic construct
  misc_feature 1..21: note = Synthetic construct
  source 1..21: mol_type = other DNA
tgtagcaggagcgtgcgtcga

SEQ ID NO: 7017 - DNA, 21 bp, synthetic construct
  misc_feature 1..21: note = Synthetic construct
  source 1..21: mol_type = other DNA
gtagcaggagcgtgcgtcgag

SEQ ID NO: 7018 - DNA, 21 bp, synthetic construct
  misc_feature 1..21: note = Synthetic construct
  source 1..21: mol_type = other DNA
tagcaggagcgtgcgtcgagg

SEQ ID NO: 7019 - DNA, 21 bp, synthetic construct
  misc_feature 1..21: note = Synthetic construct
  source 1..21: mol_type = other DNA
agcaggagcgtgcgtcgaggg

SEQ ID NO: 7020 - DNA, 21 bp, synthetic construct
  misc_feature 1..21: note = Synthetic construct
  source 1..21: mol_type = other DNA
gcaggagcgtgcgtcgaggga

SEQ ID NO: 7021 - DNA, 21 bp, synthetic construct
  misc_feature 1..21: note = Synthetic construct
  source 1..21: mol_type = other DNA
caggagcgtgcgtcgagggag

SEQ ID NO: 7022 - DNA, 21 bp, synthetic construct
  misc_feature 1..21: note = Synthetic construct
  source 1..21: mol_type = other DNA
aggagcgtgcgtcgagggaga

SEQ ID NO: 7023 - DNA, 21 bp, synthetic construct
  misc_feature 1..21: note = Synthetic construct
  source 1..21: mol_type = other DNA
ggagcgtgcgtcgagggagaa

SEQ ID NO: 7024 - DNA, 21 bp, synthetic construct
  misc_feature 1..21: note = Synthetic construct
  source 1..21: mol_type = other DNA
gagcgtgcgtcgagggagaag

SEQ ID NO: 7025 - DNA, 21 bp, synthetic construct
  misc_feature 1..21: note = Synthetic construct
  source 1..21: mol_type = other DNA
agcgtgcgtcgagggagaagc

SEQ ID NO: 7026 - DNA, 21 bp, synthetic construct
  misc_feature 1..21: note = Synthetic construct
  source 1..21: mol_type = other DNA
gcgtgcgtcgagggagaagcc

SEQ ID NO: 7027 - DNA, 21 bp, synthetic construct
  misc_feature 1..21: note = Synthetic construct
  source 1..21: mol_type = other DNA
cgtgcgtcgagggagaagccg

SEQ ID NO: 7028 - DNA, 21 bp, synthetic construct
  misc_feature 1..21: note = Synthetic construct
  source 1..21: mol_type = other DNA
gtgcgtcgagggagaagccga

SEQ ID NO: 7029 - DNA, 21 bp, synthetic construct
  misc_feature 1..21: note = Synthetic construct
  source 1..21: mol_type = other DNA
tgcgtcgagggagaagccgaa

SEQ ID NO: 7030 - DNA, 21 bp, synthetic construct
  misc_feature 1..21: note = Synthetic construct
  source 1..21: mol_type = other DNA
gcgtcgagggagaagccgaaa

SEQ ID NO: 7031 - DNA, 21 bp, synthetic construct
  misc_feature 1..21: note = Synthetic construct
  source 1..21: mol_type = other DNA
cgtcgagggagaagccgaaac

SEQ ID NO: 7032 - DNA, 21 bp, synthetic construct
  misc_feature 1..21: note = Synthetic construct
  source 1..21: mol_type = other DNA
gtcgagggagaagccgaaacc

SEQ ID NO: 7033 - DNA, 21 bp, synthetic construct
  misc_feature 1..21: note = Synthetic construct
  source 1..21: mol_type = other DNA
tcgagggagaagccgaaaccg

SEQ ID NO: 7034 - DNA, 21 bp, synthetic construct
  misc_feature 1..21: note = Synthetic construct
  source 1..21: mol_type = other DNA
cgagggagaagccgaaaccgg

SEQ ID NO: 7035 - DNA, 21 bp, synthetic construct
  misc_feature 1..21: note = Synthetic construct
  source 1..21: mol_type = other DNA
gagggagaagccgaaaccggc

SEQ ID NO: 7036 - DNA, 21 bp, synthetic construct
  misc_feature 1..21: note = Synthetic construct
  source 1..21: mol_type = other DNA
agggagaagccgaaaccggct

SEQ ID NO: 7037 - DNA, 21 bp, synthetic construct
  misc_feature 1..21: note = Synthetic construct
  source 1..21: mol_type = other DNA
gggagaagccgaaaccggctt

SEQ ID NO: 7038 - DNA, 21 bp, synthetic construct
  misc_feature 1..21: note = Synthetic construct
  source 1..21: mol_type = other DNA
ggagaagccgaaaccggcttt

SEQ ID NO: 7039 - DNA, 21 bp, synthetic construct
  misc_feature 1..21: note = Synthetic construct
  source 1..21: mol_type = other DNA
gagaagccgaaaccggctttc

SEQ ID NO: 7040 - DNA, 21 bp, synthetic construct
  misc_feature 1..21: note = Synthetic construct
  source 1..21: mol_type = other DNA
agaagccgaaaccggctttct

SEQ ID NO: 7041 - DNA, 21 bp, synthetic construct
  misc_feature 1..21: note = Synthetic construct
  source 1..21: mol_type = other DNA
gaagccgaaaccggctttctc

SEQ ID NO: 7042 - DNA, 21 bp, synthetic construct
  misc_feature 1..21: note = Synthetic construct
  source 1..21: mol_type = other DNA
aagccgaaaccggctttctcc

SEQ ID NO: 7043 - DNA, 21 bp, synthetic construct
  misc_feature 1..21: note = Synthetic construct
  source 1..21: mol_type = other DNA
agccgaaaccggctttctcct

SEQ ID NO: 7044 - DNA, 21 bp, synthetic construct
  misc_feature 1..21: note = Synthetic construct
  source 1..21: mol_type = other DNA
gccgaaaccggctttctcctc

SEQ ID NO: 7045 - DNA, 21 bp, synthetic construct
  misc_feature 1..21: note = Synthetic construct
  source 1..21: mol_type = other DNA
ccgaaaccggctttctcctcg

SEQ ID NO: 7046 - DNA, 21 bp, synthetic construct
  misc_feature 1..21: note = Synthetic construct
  source 1..21: mol_type = other DNA
cgaaaccggctttctcctcgt

SEQ ID NO: 7047 - DNA, 21 bp, synthetic construct
  misc_feature 1..21: note = Synthetic construct
  source 1..21: mol_type = other DNA
gaaaccggctttctcctcgta

SEQ ID NO: 7048 - DNA, 21 bp, synthetic construct
  misc_feature 1..21: note = Synthetic construct
  source 1..21: mol_type = other DNA
aaaccggctttctcctcgtac

SEQ ID NO: 7049 - DNA, 21 bp, synthetic construct
  misc_feature 1..21: note = Synthetic construct
  source 1..21: mol_type = other DNA
aaccggctttctcctcgtacg

SEQ ID NO: 7050 - DNA, 21 bp, synthetic construct
  misc_feature 1..21: note = Synthetic construct
  source 1..21: mol_type = other DNA
accggctttctcctcgtacgg

SEQ ID NO: 7051 - DNA, 21 bp, synthetic construct
  misc_feature 1..21: note = Synthetic construct
  source 1..21: mol_type = other DNA
ccggctttctcctcgtacggg

SEQ ID NO: 7052 - DNA, 21 bp, synthetic construct
  misc_feature 1..21: note = Synthetic construct
  source 1..21: mol_type = other DNA
cggctttctcctcgtacgggc

SEQ ID NO: 7053 - DNA, 21 bp, synthetic construct
  misc_feature 1..21: note = Synthetic construct
  source 1..21: mol_type = other DNA
ggctttctcctcgtacgggcg

SEQ ID NO: 7054 - DNA, 21 bp, synthetic construct
  misc_feature 1..21: note = Synthetic construct
  source 1..21: mol_type = other DNA
gctttctcctcgtacgggcga

SEQ ID NO: 7055 - DNA, 21 bp, synthetic construct
  misc_feature 1..21: note = Synthetic construct
  source 1..21: mol_type = other DNA
ctttctcctcgtacgggcgac

SEQ ID NO: 7056 - DNA, 21 bp, synthetic construct
  misc_feature 1..21: note = Synthetic construct
  source 1..21: mol_type = other DNA
tttctcctcgtacgggcgacc

SEQ ID NO: 7057 - DNA, 21 bp, synthetic construct
  misc_feature 1..21: note = Synthetic construct
  source 1..21: mol_type = other DNA
ttctcctcgtacgggcgaccc

SEQ ID NO: 7058 - DNA, 21 bp, synthetic construct
  misc_feature 1..21: note = Synthetic construct
  source 1..21: mol_type = other DNA
tctcctcgtacgggcgacccc

SEQ ID NO: 7059 - DNA, 21 bp, synthetic construct
  misc_feature 1..21: note = Synthetic construct
  source 1..21: mol_type = other DNA
ctcctcgtacgggcgacccca

SEQ ID NO: 7060 - DNA, 21 bp, synthetic construct
  misc_feature 1..21: note = Synthetic construct
  source 1..21: mol_type = other DNA
tcctcgtacgggcgaccccac

SEQ ID NO: 7061 - DNA, 21 bp, synthetic construct
  misc_feature 1..21: note = Synthetic construct
  source 1..21: mol_type = other DNA
cctcgtacgggcgaccccacg

SEQ ID NO: 7062 - DNA, 21 bp, synthetic construct
  misc_feature 1..21: note = Synthetic construct
  source 1..21: mol_type = other DNA
ctcgtacgggcgaccccacga

SEQ ID NO: 7063 - DNA, 21 bp, synthetic construct
  misc_feature 1..21: note = Synthetic construct
  source 1..21: mol_type = other DNA
tcgtacgggcgaccccacgat

SEQ ID NO: 7064 - DNA, 21 bp, synthetic construct
  misc_feature 1..21: note = Synthetic construct
  source 1..21: mol_type = other DNA
cgtacgggcgaccccacgatg

SEQ ID NO: 7065 - DNA, 21 bp, synthetic construct
  misc_feature 1..21: note = Synthetic construct
  source 1..21: mol_type = other DNA
gtacgggcgaccccacgatga

SEQ ID NO: 7066 - DNA, 21 bp, synthetic construct
  misc_feature 1..21: note = Synthetic construct
  source 1..21: mol_type = other DNA
tacgggcgaccccacgatgac

SEQ ID NO: 7067 - DNA, 21 bp, synthetic construct
  misc_feature 1..21: note = Synthetic construct
  source 1..21: mol_type = other DNA
acgggcgaccccacgatgacc

SEQ ID NO: 7068 - DNA, 21 bp, synthetic construct
  misc_feature 1..21: note = Synthetic construct
  source 1..21: mol_type = other DNA
cgggcgaccccacgatgaccc

SEQ ID NO: 7069 - DNA, 21 bp, synthetic construct
  misc_feature 1..21: note = Synthetic construct
  source 1..21: mol_type = other DNA
gggcgaccccacgatgaccca

SEQ ID NO: 7070 - DNA, 21 bp, synthetic construct
  misc_feature 1..21: note = Synthetic construct
  source 1..21: mol_type = other DNA
ggcgaccccacgatgacccac

SEQ ID NO: 7071 - DNA, 21 bp, synthetic construct
  misc_feature 1..21: note = Synthetic construct
  source 1..21: mol_type = other DNA
gcgaccccacgatgacccact

SEQ ID NO: 7072 - DNA, 21 bp, synthetic construct
  misc_feature 1..21: note = Synthetic construct
  source 1..21: mol_type = other DNA
cgaccccacgatgacccactt

SEQ ID NO: 7073 - DNA, 21 bp, synthetic construct
  misc_feature 1..21: note = Synthetic construct
  source 1..21: mol_type = other DNA
gaccccacgatgacccacttc

SEQ ID NO: 7074 - DNA, 21 bp, synthetic construct
  misc_feature 1..21: note = Synthetic construct
  source 1..21: mol_type = other DNA
accccacgatgacccacttcg

SEQ ID NO: 7075 - DNA, 21 bp, synthetic construct
  misc_feature 1..21: note = Synthetic construct
  source 1..21: mol_type = other DNA
ccccacgatgacccacttcgc

SEQ ID NO: 7076 - DNA, 21 bp, synthetic construct
  misc_feature 1..21: note = Synthetic construct
  source 1..21: mol_type = other DNA
cccacgatgacccacttcgct

SEQ ID NO: 7077 - DNA, 21 bp, synthetic construct
  misc_feature 1..21: note = Synthetic construct
  source 1..21: mol_type = other DNA
ccacgatgacccacttcgctt

SEQ ID NO: 7078 - DNA, 21 bp, synthetic construct
  misc_feature 1..21: note = Synthetic construct
  source 1..21: mol_type = other DNA
cacgatgacccacttcgcttg

SEQ ID NO: 7079 - DNA, 21 bp, synthetic construct
  misc_feature 1..21: note = Synthetic construct
  source 1..21: mol_type = other DNA
acgatgacccacttcgcttgt

SEQ ID NO: 7080 - DNA, 21 bp, synthetic construct
  misc_feature 1..21: note = Synthetic construct
  source 1..21: mol_type = other DNA
cgatgacccacttcgcttgta

SEQ ID NO: 7081 - DNA, 21 bp, synthetic construct
  misc_feature 1..21: note = Synthetic construct
  source 1..21: mol_type = other DNA
gatgacccacttcgcttgtag

SEQ ID NO: 7082 - DNA, 21 bp, synthetic construct
  misc_feature 1..21: note = Synthetic construct
  source 1..21: mol_type = other DNA
atgacccacttcgcttgtagg

SEQ ID NO: 7083 - DNA, 21 bp, synthetic construct
  misc_feature 1..21: note = Synthetic construct
  source 1..21: mol_type = other DNA
tgacccacttcgcttgtaggc

SEQ ID NO: 7084 - DNA, 21 bp, synthetic construct
  misc_feature 1..21: note = Synthetic construct
  source 1..21: mol_type = other DNA
gacccacttcgcttgtaggca

SEQ ID NO: 7085 - DNA, 21 bp, synthetic construct
  misc_feature 1..21: note = Synthetic construct
  source 1..21: mol_type = other DNA
acccacttcgcttgtaggcac

SEQ ID NO: 7086 - DNA, 21 bp, synthetic construct
  misc_feature 1..21: note = Synthetic construct
  source 1..21: mol_type = other DNA
cccacttcgcttgtaggcacc

SEQ ID NO: 7087 - DNA, 21 bp, synthetic construct
  misc_feature 1..21: note = Synthetic construct
  source 1..21: mol_type = other DNA
ccacttcgcttgtaggcacct

SEQ ID NO: 7088 - DNA, 21 bp, synthetic construct
  misc_feature 1..21: note = Synthetic construct
  source 1..21: mol_type = other DNA
cacttcgcttgtaggcacctt

SEQ ID NO: 7089 - DNA, 21 bp, synthetic construct
  misc_feature 1..21: note = Synthetic construct
  source 1..21: mol_type = other DNA
acttcgcttgtaggcaccttg

SEQ ID NO: 7090 - DNA, 21 bp, synthetic construct
  misc_feature 1..21: note = Synthetic construct
  source 1..21: mol_type = other DNA
cttcgcttgtaggcaccttga

SEQ ID NO: 7091 - DNA, 21 bp, synthetic construct
  misc_feature 1..21: note = Synthetic construct
  source 1..21: mol_type = other DNA
ttcgcttgtaggcaccttgat

SEQ ID NO: 7092 - DNA, 21 bp, synthetic construct
  misc_feature 1..21: note = Synthetic construct
  source 1..21: mol_type = other DNA
tcgcttgtaggcaccttgatc

SEQ ID NO: 7093 - DNA, 21 bp, synthetic construct
  misc_feature 1..21: note = Synthetic construct
  source 1..21: mol_type = other DNA
cgcttgtaggcaccttgatct

SEQ ID NO: 7094 - DNA, 21 bp, synthetic construct
  misc_feature 1..21: note = Synthetic construct
  source 1..21: mol_type = other DNA
gcttgtaggcaccttgatcta

SEQ ID NO: 7095 - DNA, 21 bp, synthetic construct
  misc_feature 1..21: note = Synthetic construct
  source 1..21: mol_type = other DNA
cttgtaggcaccttgatctat

SEQ ID NO: 7096 - DNA, 21 bp, synthetic construct
  misc_feature 1..21: note = Synthetic construct
  source 1..21: mol_type = other DNA
ttgtaggcaccttgatctatc

SEQ ID NO: 7097 - DNA, 21 bp, synthetic construct
  misc_feature 1..21: note = Synthetic construct
  source 1..21: mol_type = other DNA
tgtaggcaccttgatctatcg

SEQ ID NO: 7098 - DNA, 21 bp, synthetic construct
  misc_feature 1..21: note = Synthetic construct
  source 1..21: mol_type = other DNA
gtaggcaccttgatctatcga

SEQ ID NO: 7099 - DNA, 21 bp, synthetic construct
  misc_feature 1..21: note = Synthetic construct
  source 1..21: mol_type = other DNA
taggcaccttgatctatcgat

SEQ ID NO: 7100 - DNA, 21 bp, synthetic construct
  misc_feature 1..21: note = Synthetic construct
  source 1..21: mol_type = other DNA
aggcaccttgatctatcgatg

SEQ ID NO: 7101 - DNA, 21 bp, synthetic construct
  misc_feature 1..21: note = Synthetic construct
  source 1..21: mol_type = other DNA
ggcaccttgatctatcgatgt

SEQ ID NO: 7102 - DNA, 21 bp, synthetic construct
  misc_feature 1..21: note = Synthetic construct
  source 1..21: mol_type = other DNA
gcaccttgatctatcgatgtg

SEQ ID NO: 7103 - DNA, 21 bp, synthetic construct
  misc_feature 1..21: note = Synthetic construct
  source 1..21: mol_type = other DNA
caccttgatctatcgatgtga

SEQ ID NO: 7104 - DNA, 21 bp, synthetic construct
  misc_feature 1..21: note = Synthetic construct
  source 1..21: mol_type = other DNA
accttgatctatcgatgtgac

SEQ ID NO: 7105 - DNA, 21 bp, synthetic construct
  misc_feature 1..21: note = Synthetic construct
  source 1..21: mol_type = other DNA
ccttgatctatcgatgtgaca

SEQ ID NO: 7106 - DNA, 21 bp, synthetic construct
  misc_feature 1..21: note = Synthetic construct
  source 1..21: mol_type = other DNA
cttgatctatcgatgtgacac

SEQ ID NO: 7107 - DNA, 21 bp, synthetic construct
  misc_feature 1..21: note = Synthetic construct
  source 1..21: mol_type = other DNA
ttgatctatcgatgtgacact

SEQ ID NO: 7108 - DNA, 21 bp, synthetic construct
  misc_feature 1..21: note = Synthetic construct
  source 1..21: mol_type = other DNA
tgatctatcgatgtgacactt

SEQ ID NO: 7109 - DNA, 21 bp, synthetic construct
  misc_feature 1..21: note = Synthetic construct
  source 1..21: mol_type = other DNA
gatctatcgatgtgacactta

SEQ ID NO: 7110 - DNA, 21 bp, synthetic construct
  misc_feature 1..21: note = Synthetic construct
  source 1..21: mol_type = other DNA
atctatcgatgtgacacttaa

SEQ ID NO: 7111 - DNA, 21 bp, synthetic construct
  misc_feature 1..21: note = Synthetic construct
  source 1..21: mol_type = other DNA
tctatcgatgtgacacttaac

SEQ ID NO: 7112 - DNA, 21 bp, synthetic construct
  misc_feature 1..21: note = Synthetic construct
  source 1..21: mol_type = other DNA
ctatcgatgtgacacttaacg

SEQ ID NO: 7113 - DNA, 21 bp, synthetic construct
  misc_feature 1..21: note = Synthetic construct
  source 1..21: mol_type = other DNA
tatcgatgtgacacttaacgc

SEQ ID NO: 7114 - DNA, 21 bp, synthetic construct
  misc_feature 1..21: note = Synthetic construct
  source 1..21: mol_type = other DNA
atcgatgtgacacttaacgcc

SEQ ID NO: 7115 - DNA, 21 bp, synthetic construct
  misc_feature 1..21: note = Synthetic construct
  source 1..21: mol_type = other DNA
tcgatgtgacacttaacgccc

SEQ ID NO: 7116 - DNA, 21 bp, synthetic construct
  misc_feature 1..21: note = Synthetic construct
  source 1..21: mol_type = other DNA
cgatgtgacacttaacgcccc

SEQ ID NO: 7117 - DNA, 21 bp, synthetic construct
  misc_feature 1..21: note = Synthetic construct
  source 1..21: mol_type = other DNA
gatgtgacacttaacgccccc

SEQ ID NO: 7118 - DNA, 21 bp, synthetic construct
  misc_feature 1..21: note = Synthetic construct
  source 1..21: mol_type = other DNA
atgtgacacttaacgcccccc

SEQ ID NO: 7119 - DNA, 21 bp, synthetic construct
  misc_feature 1..21: note = Synthetic construct
  source 1..21: mol_type = other DNA
tgtgacacttaacgccccccg

SEQ ID NO: 7120 - DNA, 21 bp, synthetic construct
  misc_feature 1..21: note = Synthetic construct
  source 1..21: mol_type = other DNA
gtgacacttaacgccccccgt

SEQ ID NO: 7121 - DNA, 21 bp, synthetic construct
  misc_feature 1..21: note = Synthetic construct
  source 1..21: mol_type = other DNA
tgacacttaacgccccccgtg

SEQ ID NO: 7122 - DNA, 21 bp, synthetic construct
  misc_feature 1..21: note = Synthetic construct
  source 1..21: mol_type = other DNA
gacacttaacgccccccgtga

SEQ ID NO: 7123 - DNA, 21 bp, synthetic construct
  misc_feature 1..21: note = Synthetic construct
  source 1..21: mol_type = other DNA
acacttaacgccccccgtgaa

SEQ ID NO: 7124 - DNA, 21 bp, synthetic construct
  misc_feature 1..21: note = Synthetic construct
  source 1..21: mol_type = other DNA
cacttaacgccccccgtgaat

SEQ ID NO: 7125 - DNA, 21 bp, synthetic construct
  misc_feature 1..21: note = Synthetic construct
  source 1..21: mol_type = other DNA
acttaacgccccccgtgaata

SEQ ID NO: 7126 - DNA, 21 bp, synthetic construct
  misc_feature 1..21: note = Synthetic construct
  source 1..21: mol_type = other DNA
cttaacgccccccgtgaatac

SEQ ID NO: 7127 - DNA, 21 bp, synthetic construct
  misc_feature 1..21: note = Synthetic construct
  source 1..21: mol_type = other DNA
ttaacgccccccgtgaatacg

SEQ ID NO: 7128 - DNA, 21 bp, synthetic construct
  misc_feature 1..21: note = Synthetic construct
  source 1..21: mol_type = other DNA
taacgccccccgtgaatacgg

SEQ ID NO: 7129 - DNA, 21 bp, synthetic construct
  misc_feature 1..21: note = Synthetic construct
  source 1..21: mol_type = other DNA
aacgccccccgtgaatacgga

SEQ ID NO: 7130 - DNA, 21 bp, synthetic construct
  misc_feature 1..21: note = Synthetic construct
  source 1..21: mol_type = other DNA
acgccccccgtgaatacggag

SEQ ID NO: 7131 - DNA, 21 bp, synthetic construct
  misc_feature 1..21: note = Synthetic construct
  source 1..21: mol_type = other DNA
cgccccccgtgaatacggaga

SEQ ID NO: 7132 - DNA, 21 bp, synthetic construct
  misc_feature 1..21: note = Synthetic construct
  source 1..21: mol_type = other DNA
gccccccgtgaatacggagag

SEQ ID NO: 7133 - DNA, 21 bp, synthetic construct
  misc_feature 1..21: note = Synthetic construct
  source 1..21: mol_type = other DNA
ccccccgtgaatacggagagg

SEQ ID NO: 7134 - DNA, 21 bp, synthetic construct
  misc_feature 1..21: note = Synthetic construct
  source 1..21: mol_type = other DNA
cccccgtgaatacggagaggg

SEQ ID NO: 7135 - DNA, 21 bp, synthetic construct
  misc_feature 1..21: note = Synthetic construct
  source 1..21: mol_type = other DNA
ccccgtgaatacggagagggg

SEQ ID NO: 7136 - DNA, 21 bp, synthetic construct
  misc_feature 1..21: note = Synthetic construct
  source 1..21: mol_type = other DNA
cccgtgaatacggagaggggt

SEQ ID NO: 7137 - DNA, 21 bp, synthetic construct
  misc_feature 1..21: note = Synthetic construct
  source 1..21: mol_type = other DNA
ccgtgaatacggagaggggta

SEQ ID NO: 7138 - DNA, 21 bp, synthetic construct
  misc_feature 1..21: note = Synthetic construct
  source 1..21: mol_type = other DNA
cgtgaatacggagaggggtag

SEQ ID NO: 7139 - DNA, 21 bp, synthetic construct
  misc_feature 1..21: note = Synthetic construct
  source 1..21: mol_type = other DNA
gtgaatacggagaggggtagt

SEQ ID NO: 7140 - DNA, 21 bp, synthetic construct
  misc_feature 1..21: note = Synthetic construct
  source 1..21: mol_type = other DNA
tgaatacggagaggggtagtg

SEQ ID NO: 7141 - DNA, 21 bp, synthetic construct
  misc_feature 1..21: note = Synthetic construct
  source 1..21: mol_type = other DNA
gaatacggagaggggtagtgc

SEQ ID NO: 7142 - DNA, 21 bp, synthetic construct
  misc_feature 1..21: note = Synthetic construct
  source 1..21: mol_type = other DNA
aatacggagaggggtagtgcc

SEQ ID NO: 7143 - DNA, 21 bp, synthetic construct
  misc_feature 1..21: note = Synthetic construct
  source 1..21: mol_type = other DNA
atacggagaggggtagtgcca

SEQ ID NO: 7144 - DNA, 21 bp, synthetic construct
  misc_feature 1..21: note = Synthetic construct
  source 1..21: mol_type = other DNA
tacggagaggggtagtgccac

SEQ ID NO: 7145 - DNA, 21 bp, synthetic construct
  misc_feature 1..21: note = Synthetic construct
  source 1..21: mol_type = other DNA
acggagaggggtagtgccact

SEQ ID NO: 7146 - DNA, 21 bp, synthetic construct
  misc_feature 1..21: note = Synthetic construct
  source 1..21: mol_type = other DNA
cggagaggggtagtgccactg

SEQ ID NO: 7147 - DNA, 21 bp, synthetic construct
  misc_feature 1..21: note = Synthetic construct
  source 1..21: mol_type = other DNA
ggagaggggtagtgccactgt

SEQ ID NO: 7148 - DNA, 21 bp, synthetic construct
  misc_feature 1..21: note = Synthetic construct
  source 1..21: mol_type = other DNA
gagaggggtagtgccactgtt

SEQ ID NO: 7149 - DNA, 21 bp, synthetic construct
  misc_feature 1..21: note = Synthetic construct
  source 1..21: mol_type = other DNA
agaggggtagtgccactgttt

SEQ ID NO: 7150 - DNA, 21 bp, synthetic construct
  misc_feature 1..21: note = Synthetic construct
  source 1..21: mol_type = other DNA
gaggggtagtgccactgtttc

SEQ ID NO: 7151 - DNA, 21 bp, synthetic construct
  misc_feature 1..21: note = Synthetic construct
  source 1..21: mol_type = other DNA
aggggtagtgccactgtttcg

SEQ ID NO: 7152 - DNA, 21 bp, synthetic construct
  misc_feature 1..21: note = Synthetic construct
  source 1..21: mol_type = other DNA
ggggtagtgccactgtttcgt

SEQ ID NO: 7153 - DNA, 21 bp, synthetic construct
  misc_feature 1..21: note = Synthetic construct
  source 1..21: mol_type = other DNA
gggtagtgccactgtttcgtt

SEQ ID NO: 7154 - DNA, 21 bp, synthetic construct
  misc_feature 1..21: note = Synthetic construct
  source 1..21: mol_type = other DNA
ggtagtgccactgtttcgttt

SEQ ID NO: 7155 - DNA, 21 bp, synthetic construct
  misc_feature 1..21: note = Synthetic construct
  source 1..21: mol_type = other DNA
gtagtgccactgtttcgtttt

SEQ ID NO: 7156 - DNA, 21 bp, synthetic construct
  misc_feature 1..21: note = Synthetic construct
  source 1..21: mol_type = other DNA
tagtgccactgtttcgttttg

SEQ ID NO: 7157 - DNA, 21 bp, synthetic construct
  misc_feature 1..21: note = Synthetic construct
  source 1..21: mol_type = other DNA
agtgccactgtttcgttttgg

SEQ ID NO: 7158 - DNA, 21 bp, synthetic construct
  misc_feature 1..21: note = Synthetic construct
  source 1..21: mol_type = other DNA
gtgccactgtttcgttttggc

SEQ ID NO: 7159 - DNA, 21 bp, synthetic construct
  misc_feature 1..21: note = Synthetic construct
  source 1..21: mol_type = other DNA
tgccactgtttcgttttggcc

SEQ ID NO: 7160 - DNA, 21 bp, synthetic construct
  misc_feature 1..21: note = Synthetic construct
  source 1..21: mol_type = other DNA
gccactgtttcgttttggccc

SEQ ID NO: 7161 - DNA, 21 bp, synthetic construct
  misc_feature 1..21: note = Synthetic construct
  source 1..21: mol_type = other DNA
ccactgtttcgttttggcccc

SEQ ID NO: 7162 - DNA, 21 bp, synthetic construct
  misc_feature 1..21: note = Synthetic construct
  source 1..21: mol_type = other DNA
cactgtttcgttttggcccca

SEQ ID NO: 7163 - DNA, 21 bp, synthetic construct
  misc_feature 1..21: note = Synthetic construct
  source 1..21: mol_type = other DNA
actgtttcgttttggccccag

SEQ ID NO: 7164 - DNA, 21 bp, synthetic construct
  misc_feature 1..21: note = Synthetic construct
  source 1..21: mol_type = other DNA
ctgtttcgttttggccccagt

SEQ ID NO: 7165 - DNA, 21 bp, synthetic construct
  misc_feature 1..21: note = Synthetic construct
  source 1..21: mol_type = other DNA
tgtttcgttttggccccagtc

SEQ ID NO: 7166 - DNA, 21 bp, synthetic construct
  misc_feature 1..21: note = Synthetic construct
  source 1..21: mol_type = other DNA
gtttcgttttggccccagtcg

SEQ ID NO: 7167 - DNA, 21 bp, synthetic construct
  misc_feature 1..21: note = Synthetic construct
  source 1..21: mol_type = other DNA
tttcgttttggccccagtcga

SEQ ID NO: 7168 - DNA, 21 bp, synthetic construct
  misc_feature 1..21: note = Synthetic construct
  source 1..21: mol_type = other DNA
ttcgttttggccccagtcgag

SEQ ID NO: 7169 - DNA, 21 bp, synthetic construct
  misc_feature 1..21: note = Synthetic construct
  source 1..21: mol_type = other DNA
tcgttttggccccagtcgagt

SEQ ID NO: 7170 - DNA, 21 bp, synthetic construct
  misc_feature 1..21: note = Synthetic construct
  source 1..21: mol_type = other DNA
cgttttggccccagtcgagtt

SEQ ID NO: 7171 - DNA, 21 bp, synthetic construct
  misc_feature 1..21: note = Synthetic construct
  source 1..21: mol_type = other DNA
gttttggccccagtcgagtta

SEQ ID NO: 7172 - DNA, 21 bp, synthetic construct
  misc_feature 1..21: note = Synthetic construct
  source 1..21: mol_type = other DNA
ttttggccccagtcgagttaa

SEQ ID NO: 7173 - DNA, 21 bp, synthetic construct
  misc_feature 1..21: note = Synthetic construct
  source 1..21: mol_type = other DNA
tttggccccagtcgagttaaa

SEQ ID NO: 7174 - DNA, 21 bp, synthetic construct
  misc_feature 1..21: note = Synthetic construct
  source 1..21: mol_type = other DNA
ttggccccagtcgagttaaaa

SEQ ID NO: 7175 - DNA, 21 bp, synthetic construct
  misc_feature 1..21: note = Synthetic construct
  source 1..21: mol_type = other DNA
tggccccagtcgagttaaaac

SEQ ID NO: 7176 - DNA, 21 bp, synthetic construct
  misc_feature 1..21: note = Synthetic construct
  source 1..21: mol_type = other DNA
ggccccagtcgagttaaaacg

SEQ ID NO: 7177 - DNA, 21 bp, synthetic construct
  misc_feature 1..21: note = Synthetic construct
  source 1..21: mol_type = other DNA
gccccagtcgagttaaaacga

SEQ ID NO: 7178 - DNA, 21 bp, synthetic construct
  misc_feature 1..21: note = Synthetic construct
  source 1..21: mol_type = other DNA
ccccagtcgagttaaaacgac

SEQ ID NO: 7179 - DNA, 21 bp, synthetic construct
  misc_feature 1..21: note = Synthetic construct
  source 1..21: mol_type = other DNA
cccagtcgagttaaaacgacc

SEQ ID NO: 7180 - DNA, 21 bp, synthetic construct
  misc_feature 1..21: note = Synthetic construct
  source 1..21: mol_type = other DNA
ccagtcgagttaaaacgaccg

SEQ ID NO: 7181 - DNA, 21 bp, synthetic construct
  misc_feature 1..21: note = Synthetic construct
  source 1..21: mol_type = other DNA
cagtcgagttaaaacgaccgg

SEQ ID NO: 7182 - DNA, 21 bp, synthetic construct
  misc_feature 1..21: note = Synthetic construct
  source 1..21: mol_type = other DNA
agtcgagttaaaacgaccggg

SEQ ID NO: 7183 - DNA, 21 bp, synthetic construct
  misc_feature 1..21: note = Synthetic construct
  source 1..21: mol_type = other DNA
gtcgagttaaaacgaccggga

SEQ ID NO: 7184 - DNA, 21 bp, synthetic construct
  misc_feature 1..21: note = Synthetic construct
  source 1..21: mol_type = other DNA
tcgagttaaaacgaccgggag

SEQ ID NO: 7185 - DNA, 21 bp, synthetic construct
  misc_feature 1..21: note = Synthetic construct
  source 1..21: mol_type = other DNA
cgagttaaaacgaccgggagt

SEQ ID NO: 7186 - DNA, 21 bp, synthetic construct
  misc_feature 1..21: note = Synthetic construct
  source 1..21: mol_type = other DNA
gagttaaaacgaccgggagtc

SEQ ID NO: 7187 - DNA, 21 bp, synthetic construct
  misc_feature 1..21: note = Synthetic construct
  source 1..21: mol_type = other DNA
agttaaaacgaccgggagtcc

SEQ ID NO: 7188 - DNA, 21 bp, synthetic construct
  misc_feature 1..21: note = Synthetic construct
  source 1..21: mol_type = other DNA
gttaaaacgaccgggagtcca

SEQ ID NO: 7189 - DNA, 21 bp, synthetic construct
  misc_feature 1..21: note = Synthetic construct
  source 1..21: mol_type = other DNA
ttaaaacgaccgggagtccag

SEQ ID NO: 7190 - DNA, 21 bp, synthetic construct
  misc_feature 1..21: note = Synthetic construct
  source 1..21: mol_type = other DNA
taaaacgaccgggagtccagt

SEQ ID NO: 7191 - DNA, 21 bp, synthetic construct
  misc_feature 1..21: note = Synthetic construct
  source 1..21: mol_type = other DNA
aaaacgaccgggagtccagtt

SEQ ID NO: 7192 - DNA, 21 bp, synthetic construct
  misc_feature 1..21: note = Synthetic construct
  source 1..21: mol_type = other DNA
aaacgaccgggagtccagttc

SEQ ID NO: 7193 - DNA, 21 bp, synthetic construct
  misc_feature 1..21: note = Synthetic construct
  source 1..21: mol_type = other DNA
aacgaccgggagtccagttcg

SEQ ID NO: 7194 - DNA, 21 bp, synthetic construct
  misc_feature 1..21: note = Synthetic construct
  source 1..21: mol_type = other DNA
acgaccgggagtccagttcga

SEQ ID NO: 7195 - DNA, 21 bp, synthetic construct
  misc_feature 1..21: note = Synthetic construct
  source 1..21: mol_type = other DNA
cgaccgggagtccagttcgaa

SEQ ID NO: 7196 - DNA, 21 bp, synthetic construct
  misc_feature 1..21: note = Synthetic construct
  source 1..21: mol_type = other DNA
gaccgggagtccagttcgaac

SEQ ID NO: 7197 - DNA, 21 bp, synthetic construct
  misc_feature 1..21: note = Synthetic construct
  source 1..21: mol_type = other DNA
accgggagtccagttcgaacg

SEQ ID NO: 7198 - DNA, 21 bp, synthetic construct
  misc_feature 1..21: note = Synthetic construct
  source 1..21: mol_type = other DNA
ccgggagtccagttcgaacga

SEQ ID NO: 7199 - DNA, 21 bp, synthetic construct
  misc_feature 1..21: note = Synthetic construct
  source 1..21: mol_type = other DNA
cgggagtccagttcgaacgat

SEQ ID NO: 7200 - DNA, 21 bp, synthetic construct
  misc_feature 1..21: note = Synthetic construct
  source 1..21: mol_type = other DNA
gggagtccagttcgaacgata

SEQ ID NO: 7201 - DNA, 21 bp, synthetic construct
  misc_feature 1..21: note = Synthetic construct
  source 1..21: mol_type = other DNA
ggagtccagttcgaacgatat

SEQ ID NO: 7202 - DNA, 21 bp, synthetic construct
  misc_feature 1..21: note = Synthetic construct
  source 1..21: mol_type = other DNA
gagtccagttcgaacgatatt

SEQ ID NO: 7203 - DNA, 21 bp, synthetic construct
  misc_feature 1..21: note = Synthetic construct
  source 1..21: mol_type = other DNA
agtccagttcgaacgatattt

SEQ ID NO: 7204 - DNA, 21 bp, synthetic construct
  misc_feature 1..21: note = Synthetic construct
  source 1..21: mol_type = other DNA
gtccagttcgaacgatatttt

SEQ ID NO: 7205 - DNA, 21 bp, synthetic construct
  misc_feature 1..21: note = Synthetic construct
  source 1..21: mol_type = other DNA
tccagttcgaacgatatttta

SEQ ID NO: 7206 - DNA, 21 bp, synthetic construct
  misc_feature 1..21: note = Synthetic construct
  source 1..21: mol_type = other DNA
ccagttcgaacgatattttaa

SEQ ID NO: 7207 - DNA, 21 bp, synthetic construct
  misc_feature 1..21: note = Synthetic construct
  source 1..21: mol_type = other DNA
cagttcgaacgatattttaaa

SEQ ID NO: 7208 - DNA, 21 bp, synthetic construct
  misc_feature 1..21: note = Synthetic construct
  source 1..21: mol_type = other DNA
agttcgaacgatattttaaag

SEQ ID NO: 7209 - DNA, 21 bp, synthetic construct
  misc_feature 1..21: note = Synthetic construct
  source 1..21: mol_type = other DNA
gttcgaacgatattttaaaga

SEQ ID NO: 7210 - DNA, 21 bp, synthetic construct
  misc_feature 1..21: note = Synthetic construct
  source 1..21: mol_type = other DNA
ttcgaacgatattttaaagag

SEQ ID NO: 7211 - DNA, 21 bp, synthetic construct
  misc_feature 1..21: note = Synthetic construct
  source 1..21: mol_type = other DNA
tcgaacgatattttaaagaga

SEQ ID NO: 7212 - DNA, 21 bp, synthetic construct
  misc_feature 1..21: note = Synthetic construct
  source 1..21: mol_type = other DNA
cgaacgatattttaaagagaa

SEQ ID NO: 7213 - DNA, 21 bp, synthetic construct
  misc_feature 1..21: note = Synthetic construct
  source 1..21: mol_type = other DNA
gaacgatattttaaagagaat

SEQ ID NO: 7214 - DNA, 21 bp, synthetic construct
  misc_feature 1..21: note = Synthetic construct
  source 1..21: mol_type = other DNA
aacgatattttaaagagaatg

SEQ ID NO: 7215 - DNA, 21 bp, synthetic construct
  misc_feature 1..21: note = Synthetic construct
  source 1..21: mol_type = other DNA
acgatattttaaagagaatga

SEQ ID NO: 7216 - DNA, 21 bp, synthetic construct
  misc_feature 1..21: note = Synthetic construct
  source 1..21: mol_type = other DNA
cgatattttaaagagaatgag

SEQ ID NO: 7217 - DNA, 21 bp, synthetic construct
  misc_feature 1..21: note = Synthetic construct
  source 1..21: mol_type = other DNA
gatattttaaagagaatgagt

SEQ ID NO: 7218 - DNA, 21 bp, synthetic construct
  misc_feature 1..21: note = Synthetic construct
  source 1..21: mol_type = other DNA
atattttaaagagaatgagtt

SEQ ID NO: 7219 - DNA, 21 bp, synthetic construct
  misc_feature 1..21: note = Synthetic construct
  source 1..21: mol_type = other DNA
tattttaaagagaatgagtta

SEQ ID NO: 7220 - DNA, 21 bp, synthetic construct
  misc_feature 1..21: note = Synthetic construct
  source 1..21: mol_type = other DNA
attttaaagagaatgagttat

SEQ ID NO: 7221 - DNA, 21 bp, synthetic construct
  misc_feature 1..21: note = Synthetic construct
  source 1..21: mol_type = other DNA
ttttaaagagaatgagttatc

SEQ ID NO: 7222 - DNA, 21 bp, synthetic construct
  misc_feature 1..21: note = Synthetic construct
  source 1..21: mol_type = other DNA
tttaaagagaatgagttatct

SEQ ID NO: 7223 - DNA, 21 bp, synthetic construct
  misc_feature 1..21: note = Synthetic construct
  source 1..21: mol_type = other DNA
ttaaagagaatgagttatctt

SEQ ID NO: 7224 - DNA, 21 bp, synthetic construct
  misc_feature 1..21: note = Synthetic construct
  source 1..21: mol_type = other DNA
taaagagaatgagttatcttc

SEQ ID NO: 7225 - DNA, 21 bp, synthetic construct
  misc_feature 1..21: note = Synthetic construct
  source 1..21: mol_type = other DNA
aaagagaatgagttatcttca

SEQ ID NO: 7226 - DNA, 21 bp, synthetic construct
  misc_feature 1..21: note = Synthetic construct
  source 1..21: mol_type = other DNA
aagagaatgagttatcttcag

SEQ ID NO: 7227 - DNA, 21 bp, synthetic construct
  misc_feature 1..21: note = Synthetic construct
  source 1..21: mol_type = other DNA
agagaatgagttatcttcagt

SEQ ID NO: 7228 - DNA, 21 bp, synthetic construct
  misc_feature 1..21: note = Synthetic construct
  source 1..21: mol_type = other DNA
gagaatgagttatcttcagtc

SEQ ID NO: 7229 - DNA, 21 bp, synthetic construct
  misc_feature 1..21: note = Synthetic construct
  source 1..21: mol_type = other DNA
agaatgagttatcttcagtct

SEQ ID NO: 7230 - DNA, 21 bp, synthetic construct
  misc_feature 1..21: note = Synthetic construct
  source 1..21: mol_type = other DNA
gaatgagttatcttcagtctc

SEQ ID NO: 7231 - DNA, 21 bp, synthetic construct
  misc_feature 1..21: note = Synthetic construct
  source 1..21: mol_type = other DNA
aatgagttatcttcagtctca

SEQ ID NO: 7232 - DNA, 21 bp, synthetic construct
  misc_feature 1..21: note = Synthetic construct
  source 1..21: mol_type = other DNA
atgagttatcttcagtctcac

SEQ ID NO: 7233 - DNA, 21 bp, synthetic construct
  misc_feature 1..21: note = Synthetic construct
  source 1..21: mol_type = other DNA
tgagttatcttcagtctcacc

SEQ ID NO: 7234 - DNA, 21 bp, synthetic construct
  misc_feature 1..21: note = Synthetic construct
  source 1..21: mol_type = other DNA
gagttatcttcagtctcaccg

SEQ ID NO: 7235 - DNA, 21 bp, synthetic construct
  misc_feature 1..21: note = Synthetic construct
  source 1..21: mol_type = other DNA
agttatcttcagtctcaccgt

SEQ ID NO: 7236 - DNA, 21 bp, synthetic construct
  misc_feature 1..21: note = Synthetic construct
  source 1..21: mol_type = other DNA
gttatcttcagtctcaccgtc

SEQ ID NO: 7237 - DNA, 21 bp, synthetic construct
  misc_feature 1..21: note = Synthetic construct
  source 1..21: mol_type = other DNA
ttatcttcagtctcaccgtcc

SEQ ID NO: 7238 - DNA, 21 bp, synthetic construct
  misc_feature 1..21: note = Synthetic construct
  source 1..21: mol_type = other DNA
tatcttcagtctcaccgtccg

SEQ ID NO: 7239 - DNA, 21 bp, synthetic construct
  misc_feature 1..21: note = Synthetic construct
  source 1..21: mol_type = other DNA
atcttcagtctcaccgtccgc

SEQ ID NO: 7240 - DNA, 21 bp, synthetic construct
  misc_feature 1..21: note = Synthetic construct
  source 1..21: mol_type = other DNA
tcttcagtctcaccgtccgcg

SEQ ID NO: 7241 - DNA, 21 bp, synthetic construct
  misc_feature 1..21: note = Synthetic construct
  source 1..21: mol_type = other DNA
cttcagtctcaccgtccgcgt

SEQ ID NO: 7242 - DNA, 21 bp, synthetic construct
  misc_feature 1..21: note = Synthetic construct
  source 1..21: mol_type = other DNA
ttcagtctcaccgtccgcgta

SEQ ID NO: 7243 - DNA, 21 bp, synthetic construct
  misc_feature 1..21: note = Synthetic construct
  source 1..21: mol_type = other DNA
tcagtctcaccgtccgcgtaa

SEQ ID NO: 7244 - DNA, 21 bp, synthetic construct
  misc_feature 1..21: note = Synthetic construct
  source 1..21: mol_type = other DNA
cagtctcaccgtccgcgtaaa

SEQ ID NO: 7245 - DNA, 21 bp, synthetic construct
  misc_feature 1..21: note = Synthetic construct
  source 1..21: mol_type = other DNA
agtctcaccgtccgcgtaaac

SEQ ID NO: 7246 - DNA, 21 bp, synthetic construct
  misc_feature 1..21: note = Synthetic construct
  source 1..21: mol_type = other DNA
gtctcaccgtccgcgtaaacg

SEQ ID NO: 7247 - DNA, 21 bp, synthetic construct
  misc_feature 1..21: note = Synthetic construct
  source 1..21: mol_type = other DNA
tctcaccgtccgcgtaaacgc

SEQ ID NO: 7248 - DNA, 21 bp, synthetic construct
  misc_feature 1..21: note = Synthetic construct
  source 1..21: mol_type = other DNA
ctcaccgtccgcgtaaacgcg

SEQ ID NO: 7249 - DNA, 21 bp, synthetic construct
  misc_feature 1..21: note = Synthetic construct
  source 1..21: mol_type = other DNA
tcaccgtccgcgtaaacgcga

SEQ ID NO: 7250 - DNA, 21 bp, synthetic construct
  misc_feature 1..21: note = Synthetic construct
  source 1..21: mol_type = other DNA
caccgtccgcgtaaacgcgaa

SEQ ID NO: 7251 - DNA, 21 bp, synthetic construct
  misc_feature 1..21: note = Synthetic construct
  source 1..21: mol_type = other DNA
accgtccgcgtaaacgcgaac

SEQ ID NO: 7252 - DNA, 21 bp, synthetic construct
  misc_feature 1..21: note = Synthetic construct
  source 1..21: mol_type = other DNA
ccgtccgcgtaaacgcgaacg

SEQ ID NO: 7253 - DNA, 21 bp, synthetic construct
  misc_feature 1..21: note = Synthetic construct
  source 1..21: mol_type = other DNA
cgtccgcgtaaacgcgaacgg

SEQ ID NO: 7254 - DNA, 21 bp, synthetic construct
  misc_feature 1..21: note = Synthetic construct
  source 1..21: mol_type = other DNA
gtccgcgtaaacgcgaacgga

SEQ ID NO: 7255 - DNA, 21 bp, synthetic construct
  misc_feature 1..21: note = Synthetic construct
  source 1..21: mol_type = other DNA
tccgcgtaaacgcgaacggag

SEQ ID NO: 7256 - DNA, 21 bp, synthetic construct
  misc_feature 1..21: note = Synthetic construct
  source 1..21: mol_type = other DNA
ccgcgtaaacgcgaacggagg

SEQ ID NO: 7257 - DNA, 21 bp, synthetic construct
  misc_feature 1..21: note = Synthetic construct
  source 1..21: mol_type = other DNA
cgcgtaaacgcgaacggaggg

SEQ ID NO: 7258 - DNA, 21 bp, synthetic construct
  misc_feature 1..21: note = Synthetic construct
  source 1..21: mol_type = other DNA
gcgtaaacgcgaacggagggg

SEQ ID NO: 7259 - DNA, 21 bp, synthetic construct
  misc_feature 1..21: note = Synthetic construct
  source 1..21: mol_type = other DNA
cgtaaacgcgaacggagggga

SEQ ID NO: 7260 - DNA, 21 bp, synthetic construct
  misc_feature 1..21: note = Synthetic construct
  source 1..21: mol_type = other DNA
gtaaacgcgaacggaggggac

SEQ ID NO: 7261 - DNA, 21 bp, synthetic construct
  misc_feature 1..21: note = Synthetic construct
  source 1..21: mol_type = other DNA
taaacgcgaacggaggggacg

SEQ ID NO: 7262 - DNA, 21 bp, synthetic construct
  misc_feature 1..21: note = Synthetic construct
  source 1..21: mol_type = other DNA
aaacgcgaacggaggggacga

SEQ ID NO: 7263 - DNA, 21 bp, synthetic construct
  misc_feature 1..21: note = Synthetic construct
  source 1..21: mol_type = other DNA
aacgcgaacggaggggacgaa

SEQ ID NO: 7264 - DNA, 21 bp, synthetic construct
  misc_feature 1..21: note = Synthetic construct
  source 1..21: mol_type = other DNA
acgcgaacggaggggacgaag

SEQ ID NO: 7265 - DNA, 21 bp, synthetic construct
  misc_feature 1..21: note = Synthetic construct
  source 1..21: mol_type = other DNA
cgcgaacggaggggacgaagg

SEQ ID NO: 7266 - DNA, 21 bp, synthetic construct
  misc_feature 1..21: note = Synthetic construct
  source 1..21: mol_type = other DNA
gcgaacggaggggacgaaggt

SEQ ID NO: 7267 - DNA, 21 bp, synthetic construct
  misc_feature 1..21: note = Synthetic construct
  source 1..21: mol_type = other DNA
cgaacggaggggacgaaggtc

SEQ ID NO: 7268 - DNA, 21 bp, synthetic construct
  misc_feature 1..21: note = Synthetic construct
  source 1..21: mol_type = other DNA
gaacggaggggacgaaggtct

SEQ ID NO: 7269 - DNA, 21 bp, synthetic construct
  misc_feature 1..21: note = Synthetic construct
  source 1..21: mol_type = other DNA
aacggaggggacgaaggtctc

SEQ ID NO: 7270 - DNA, 21 bp, synthetic construct
  misc_feature 1..21: note = Synthetic construct
  source 1..21: mol_type = other DNA
acggaggggacgaaggtctcg

SEQ ID NO: 7271 - DNA, 21 bp, synthetic construct
  misc_feature 1..21: note = Synthetic construct
  source 1..21: mol_type = other DNA
cggaggggacgaaggtctcgt

SEQ ID NO: 7272 - DNA, 21 bp, synthetic construct
  misc_feature 1..21: note = Synthetic construct
  source 1..21: mol_type = other DNA
ggaggggacgaaggtctcgtt

SEQ ID NO: 7273 - DNA, 21 bp, synthetic construct
  misc_feature 1..21: note = Synthetic construct
  source 1..21: mol_type = other DNA
gaggggacgaaggtctcgttc

SEQ ID NO: 7274 - DNA, 21 bp, synthetic construct
  misc_feature 1..21: note = Synthetic construct
  source 1..21: mol_type = other DNA
aggggacgaaggtctcgttct

SEQ ID NO: 7275 - DNA, 21 bp, synthetic construct
  misc_feature 1..21: note = Synthetic construct
  source 1..21: mol_type = other DNA
ggggacgaaggtctcgttctc

SEQ ID NO: 7276 - DNA, 21 bp, synthetic construct
  misc_feature 1..21: note = Synthetic construct
  source 1..21: mol_type = other DNA
gggacgaaggtctcgttctcc

SEQ ID NO: 7277 - DNA, 21 bp, synthetic construct
  misc_feature 1..21: note = Synthetic construct
  source 1..21: mol_type = other DNA
ggacgaaggtctcgttctccc

SEQ ID NO: 7278 - DNA, 21 bp, synthetic construct
  misc_feature 1..21: note = Synthetic construct
  source 1..21: mol_type = other DNA
gacgaaggtctcgttctccct

SEQ ID NO: 7279 - DNA, 21 bp, synthetic construct
  misc_feature 1..21: note = Synthetic construct
  source 1..21: mol_type = other DNA
acgaaggtctcgttctcccta

SEQ ID NO: 7280 - DNA, 21 bp, synthetic construct
  misc_feature 1..21: note = Synthetic construct
  source 1..21: mol_type = other DNA
cgaaggtctcgttctccctat

SEQ ID NO: 7281 - DNA, 21 bp, synthetic construct
  misc_feature 1..21: note = Synthetic construct
  source 1..21: mol_type = other DNA
gaaggtctcgttctccctatc

SEQ ID NO: 7282 - DNA, 21 bp, synthetic construct
  misc_feature 1..21: note = Synthetic construct
  source 1..21: mol_type = other DNA
aaggtctcgttctccctatca

SEQ ID NO: 7283 - DNA, 21 bp, synthetic construct
  misc_feature 1..21: note = Synthetic construct
  source 1..21: mol_type = other DNA
aggtctcgttctccctatcaa

SEQ ID NO: 7284 - DNA, 21 bp, synthetic construct
  misc_feature 1..21: note = Synthetic construct
  source 1..21: mol_type = other DNA
ggtctcgttctccctatcaag

SEQ ID NO: 7285 - DNA, 21 bp, synthetic construct
  misc_feature 1..21: note = Synthetic construct
  source 1..21: mol_type = other DNA
gtctcgttctccctatcaagg

SEQ ID NO: 7286 - DNA, 21 bp, synthetic construct
  misc_feature 1..21: note = Synthetic construct
  source 1..21: mol_type = other DNA
tctcgttctccctatcaaggg

SEQ ID NO: 7287 - DNA, 21 bp, synthetic construct
  misc_feature 1..21: note = Synthetic construct
  source 1..21: mol_type = other DNA
ctcgttctccctatcaagggt

SEQ ID NO: 7288 - DNA, 21 bp, synthetic construct
  misc_feature 1..21: note = Synthetic construct
  source 1..21: mol_type = other DNA
tcgttctccctatcaagggta

SEQ ID NO: 7289 - DNA, 21 bp, synthetic construct
  misc_feature 1..21: note = Synthetic construct
  source 1..21: mol_type = other DNA
cgttctccctatcaagggtac

SEQ ID NO: 7290 - DNA, 21 bp, synthetic construct
  misc_feature 1..21: note = Synthetic construct
  source 1..21: mol_type = other DNA
gttctccctatcaagggtact

SEQ ID NO: 7291 - DNA, 21 bp, synthetic construct
  misc_feature 1..21: note = Synthetic construct
  source 1..21: mol_type = other DNA
ttctccctatcaagggtacta

SEQ ID NO: 7292 - DNA, 21 bp, synthetic construct
  misc_feature 1..21: note = Synthetic construct
  source 1..21: mol_type = other DNA
tctccctatcaagggtactaa

SEQ ID NO: 7293 - DNA, 21 bp, synthetic construct
  misc_feature 1..21: note = Synthetic construct
  source 1..21: mol_type = other DNA
ctccctatcaagggtactaaa

SEQ ID NO: 7294 - DNA, 21 bp, synthetic construct
  misc_feature 1..21: note = Synthetic construct
  source 1..21: mol_type = other DNA
tccctatcaagggtactaaaa

SEQ ID NO: 7295 - DNA, 21 bp, synthetic construct
  misc_feature 1..21: note = Synthetic construct
  source 1..21: mol_type = other DNA
ccctatcaagggtactaaaag

SEQ ID NO: 7296 - DNA, 21 bp, synthetic construct
  misc_feature 1..21: note = Synthetic construct
  source 1..21: mol_type = other DNA
cctatcaagggtactaaaagc

SEQ ID NO: 7297 - DNA, 21 bp, synthetic construct
  misc_feature 1..21: note = Synthetic construct
  source 1..21: mol_type = other DNA
ctatcaagggtactaaaagct

SEQ ID NO: 7298 - DNA, 21 bp, synthetic construct
  misc_feature 1..21: note = Synthetic construct
  source 1..21: mol_type = other DNA
tatcaagggtactaaaagctc

SEQ ID NO: 7299 - DNA, 21 bp, synthetic construct
  misc_feature 1..21: note = Synthetic construct
  source 1..21: mol_type = other DNA
atcaagggtactaaaagctcg

SEQ ID NO: 7300 - DNA, 21 bp, synthetic construct
  misc_feature 1..21: note = Synthetic construct
  source 1..21: mol_type = other DNA
tcaagggtactaaaagctcgc

SEQ ID NO: 7301 - DNA, 21 bp, synthetic construct
  misc_feature 1..21: note = Synthetic construct
  source 1..21: mol_type = other DNA
caagggtactaaaagctcgca

SEQ ID NO: 7302 - DNA, 21 bp, synthetic construct
  misc_feature 1..21: note = Synthetic construct
  source 1..21: mol_type = other DNA
aagggtactaaaagctcgcac

SEQ ID NO: 7303 - DNA, 21 bp, synthetic construct
  misc_feature 1..21: note = Synthetic construct
  source 1..21: mol_type = other DNA
agggtactaaaagctcgcaca

SEQ ID NO: 7304 - DNA, 21 bp, synthetic construct
  misc_feature 1..21: note = Synthetic construct
  source 1..21: mol_type = other DNA
gggtactaaaagctcgcacag

SEQ ID NO: 7305 - DNA, 21 bp, synthetic construct
  misc_feature 1..21: note = Synthetic construct
  source 1..21: mol_type = other DNA
ggtactaaaagctcgcacagg

SEQ ID NO: 7306 - DNA, 21 bp, synthetic construct
  misc_feature 1..21: note = Synthetic construct
  source 1..21: mol_type = other DNA
gtactaaaagctcgcacaggt

SEQ ID NO: 7307 - DNA, 21 bp, synthetic construct
  misc_feature 1..21: note = Synthetic construct
  source 1..21: mol_type = other DNA
tactaaaagctcgcacaggtc

SEQ ID NO: 7308 - DNA, 21 bp, synthetic construct
  misc_feature 1..21: note = Synthetic construct
  source 1..21: mol_type = other DNA
actaaaagctcgcacaggtca

SEQ ID NO: 7309 - DNA, 21 bp, synthetic construct
  misc_feature 1..21: note = Synthetic construct
  source 1..21: mol_type = other DNA
ctaaaagctcgcacaggtcaa

SEQ ID NO: 7310 - DNA, 21 bp, synthetic construct
  misc_feature 1..21: note = Synthetic construct
  source 1..21: mol_type = other DNA
taaaagctcgcacaggtcaaa

SEQ ID NO: 7311 - DNA, 21 bp, synthetic construct
  misc_feature 1..21: note = Synthetic construct
  source 1..21: mol_type = other DNA
aaaagctcgcacaggtcaaac

SEQ ID NO: 7312 - DNA, 21 bp, synthetic construct
  misc_feature 1..21: note = Synthetic construct
  source 1..21: mol_type = other DNA
aaagctcgcacaggtcaaacc

SEQ ID NO: 7313 - DNA, 21 bp, synthetic construct
  misc_feature 1..21: note = Synthetic construct
  source 1..21: mol_type = other DNA
aagctcgcacaggtcaaacct

SEQ ID NO: 7314 - DNA, 21 bp, synthetic construct
  misc_feature 1..21: note = Synthetic construct
  source 1..21: mol_type = other DNA
agctcgcacaggtcaaacctc

SEQ ID NO: 7315 - DNA, 21 bp, synthetic construct
  misc_feature 1..21: note = Synthetic construct
  source 1..21: mol_type = other DNA
gctcgcacaggtcaaacctcc

SEQ ID NO: 7316 - DNA, 21 bp, synthetic construct
  misc_feature 1..21: note = Synthetic construct
  source 1..21: mol_type = other DNA
ctcgcacaggtcaaacctcct

SEQ ID NO: 7317 - DNA, 21 bp, synthetic construct
  misc_feature 1..21: note = Synthetic construct
  source 1..21: mol_type = other DNA
tcgcacaggtcaaacctccta

SEQ ID NO: 7318 - DNA, 21 bp, synthetic construct
  misc_feature 1..21: note = Synthetic construct
  source 1..21: mol_type = other DNA
cgcacaggtcaaacctcctag

SEQ ID NO: 7319 - DNA, 21 bp, synthetic construct
  misc_feature 1..21: note = Synthetic construct
  source 1..21: mol_type = other DNA
gcacaggtcaaacctcctagg

SEQ ID NO: 7320 - DNA, 21 bp, synthetic construct
  misc_feature 1..21: note = Synthetic construct
  source 1..21: mol_type = other DNA
cacaggtcaaacctcctagga

SEQ ID NO: 7321 - DNA, 21 bp, synthetic construct
  misc_feature 1..21: note = Synthetic construct
  source 1..21: mol_type = other DNA
acaggtcaaacctcctaggaa

SEQ ID NO: 7322 - DNA, 21 bp, synthetic construct
  misc_feature 1..21: note = Synthetic construct
  source 1..21: mol_type = other DNA
caggtcaaacctcctaggaat

SEQ ID NO: 7323 - DNA, 21 bp, synthetic construct
  misc_feature 1..21: note = Synthetic construct
  source 1..21: mol_type = other DNA
aggtcaaacctcctaggaatg

SEQ ID NO: 7324 - DNA, 21 bp, synthetic construct
  misc_feature 1..21: note = Synthetic construct
  source 1..21: mol_type = other DNA
ggtcaaacctcctaggaatgg

SEQ ID NO: 7325 - DNA, 21 bp, synthetic construct
  misc_feature 1..21: note = Synthetic construct
  source 1..21: mol_type = other DNA
gtcaaacctcctaggaatgga

SEQ ID NO: 7326 - DNA, 21 bp, synthetic construct
  misc_feature 1..21: note = Synthetic construct
  source 1..21: mol_type = other DNA
tcaaacctcctaggaatggaa

SEQ ID NO: 7327 - DNA, 21 bp, synthetic construct
  misc_feature 1..21: note = Synthetic construct
  source 1..21: mol_type = other DNA
caaacctcctaggaatggaat

SEQ ID NO: 7328 - DNA, 21 bp, synthetic construct
  misc_feature 1..21: note = Synthetic construct
  source 1..21: mol_type = other DNA
aaacctcctaggaatggaatt

SEQ ID NO: 7329 - DNA, 21 bp, synthetic construct
  misc_feature 1..21: note = Synthetic construct
  source 1..21: mol_type = other DNA
aacctcctaggaatggaattc

SEQ ID NO: 7330 - DNA, 21 bp, synthetic construct
  misc_feature 1..21: note = Synthetic construct
  source 1..21: mol_type = other DNA
acctcctaggaatggaattcc

SEQ ID NO: 7331 - DNA, 21 bp, synthetic construct
  misc_feature 1..21: note = Synthetic construct
  source 1..21: mol_type = other DNA
cctcctaggaatggaattccg

SEQ ID NO: 7332 - DNA, 21 bp, synthetic construct
  misc_feature 1..21: note = Synthetic construct
  source 1..21: mol_type = other DNA
ctcctaggaatggaattccgg

SEQ ID NO: 7333 - DNA, 21 bp, synthetic construct
  misc_feature 1..21: note = Synthetic construct
  source 1..21: mol_type = other DNA
tcctaggaatggaattccggc

SEQ ID NO: 7334 - DNA, 21 bp, synthetic construct
  misc_feature 1..21: note = Synthetic construct
  source 1..21: mol_type = other DNA
cctaggaatggaattccggct

SEQ ID NO: 7335 - DNA, 21 bp, synthetic construct
  misc_feature 1..21: note = Synthetic construct
  source 1..21: mol_type = other DNA
ctaggaatggaattccggcta

SEQ ID NO: 7336 - DNA, 21 bp, synthetic construct
  misc_feature 1..21: note = Synthetic construct
  source 1..21: mol_type = other DNA
taggaatggaattccggctac

SEQ ID NO: 7337 - DNA, 21 bp, synthetic construct
  misc_feature 1..21: note = Synthetic construct
  source 1..21: mol_type = other DNA
aggaatggaattccggctacc

SEQ ID NO: 7338 - DNA, 21 bp, synthetic construct
  misc_feature 1..21: note = Synthetic construct
  source 1..21: mol_type = other DNA
ggaatggaattccggctacct

SEQ ID NO: 7339 - DNA, 21 bp, synthetic construct
  misc_feature 1..21: note = Synthetic construct
  source 1..21: mol_type = other DNA
gaatggaattccggctaccta

SEQ ID NO: 7340 - DNA, 21 bp, synthetic construct
  misc_feature 1..21: note = Synthetic construct
  source 1..21: mol_type = other DNA
aatggaattccggctacctac

SEQ ID NO: 7341 - DNA, 21 bp, synthetic construct
  misc_feature 1..21: note = Synthetic construct
  source 1..21: mol_type = other DNA
atggaattccggctacctaca

SEQ ID NO: 7342 - DNA, 21 bp, synthetic construct
  misc_feature 1..21: note = Synthetic construct
  source 1..21: mol_type = other DNA
tggaattccggctacctacag

SEQ ID NO: 7343 - DNA, 21 bp, synthetic construct
  misc_feature 1..21: note = Synthetic construct
  source 1..21: mol_type = other DNA
ggaattccggctacctacagc

SEQ ID NO: 7344 - DNA, 21 bp, synthetic construct
  misc_feature 1..21: note = Synthetic construct
  source 1..21: mol_type = other DNA
gaattccggctacctacagcg

SEQ ID NO: 7345 - DNA, 21 bp, synthetic construct
  misc_feature 1..21: note = Synthetic construct
  source 1..21: mol_type = other DNA
aattccggctacctacagcga

SEQ ID NO: 7346 - DNA, 21 bp, synthetic construct
  misc_feature 1..21: note = Synthetic construct
  source 1..21: mol_type = other DNA
attccggctacctacagcgat

SEQ ID NO: 7347 - DNA, 21 bp, synthetic construct
  misc_feature 1..21: note = Synthetic construct
  source 1..21: mol_type = other DNA
ttccggctacctacagcgata

SEQ ID NO: 7348 - DNA, 21 bp, synthetic construct
  misc_feature 1..21: note = Synthetic construct
  source 1..21: mol_type = other DNA
tccggctacctacagcgatag

SEQ ID NO: 7349 - DNA, 21 bp, synthetic construct
  misc_feature 1..21: note = Synthetic construct
  source 1..21: mol_type = other DNA
ccggctacctacagcgatagc

SEQ ID NO: 7350 - DNA, 21 bp, synthetic construct
  misc_feature 1..21: note = Synthetic construct
  source 1..21: mol_type = other DNA
cggctacctacagcgatagcc

SEQ ID NO: 7351 - DNA, 21 bp, synthetic construct
  misc_feature 1..21: note = Synthetic construct
  source 1..21: mol_type = other DNA
ggctacctacagcgatagcca

SEQ ID NO: 7352 - DNA, 21 bp, synthetic construct
  misc_feature 1..21: note = Synthetic construct
  source 1..21: mol_type = other DNA
gctacctacagcgatagccat

SEQ ID NO: 7353 - DNA, 21 bp, synthetic construct
  misc_feature 1..21: note = Synthetic construct
  source 1..21: mol_type = other DNA
ctacctacagcgatagccatg

SEQ ID NO: 7354 - DNA, 21 bp, synthetic construct
  misc_feature 1..21: note = Synthetic construct
  source 1..21: mol_type = other DNA
tacctacagcgatagccatgg

SEQ ID NO: 7355 - DNA, 21 bp, synthetic construct
  misc_feature 1..21: note = Synthetic construct
  source 1..21: mol_type = other DNA
acctacagcgatagccatggt

SEQ ID NO: 7356 - DNA, 21 bp, synthetic construct
  misc_feature 1..21: note = Synthetic construct
  source 1..21: mol_type = other DNA
cctacagcgatagccatggta

SEQ ID NO: 7357 - DNA, 21 bp, synthetic construct
  misc_feature 1..21: note = Synthetic construct
  source 1..21: mol_type = other DNA
ctacagcgatagccatggtag

SEQ ID NO: 7358 - DNA, 21 bp, synthetic construct
  misc_feature 1..21: note = Synthetic construct
  source 1..21: mol_type = other DNA
tacagcgatagccatggtagc

SEQ ID NO: 7359 - DNA, 21 bp, synthetic construct
  misc_feature 1..21: note = Synthetic construct
  source 1..21: mol_type = other DNA
acagcgatagccatggtagcg

SEQ ID NO: 7360 - DNA, 21 bp, synthetic construct
  misc_feature 1..21: note = Synthetic construct
  source 1..21: mol_type = other DNA
cagcgatagccatggtagcgt

SEQ ID NO: 7361 - DNA, 21 bp, synthetic construct
  misc_feature 1..21: note = Synthetic construct
  source 1..21: mol_type = other DNA
agcgatagccatggtagcgtc

SEQ ID NO: 7362 - DNA, 21 bp, synthetic construct
  misc_feature 1..21: note = Synthetic construct
  source 1..21: mol_type = other DNA
gcgatagccatggtagcgtct

SEQ ID NO: 7363 - DNA, 21 bp, synthetic construct
  misc_feature 1..21: note = Synthetic construct
  source 1..21: mol_type = other DNA
cgatagccatggtagcgtctc

SEQ ID NO: 7364 - DNA, 21 bp, synthetic construct
  misc_feature 1..21: note = Synthetic construct
  source 1..21: mol_type = other DNA
gatagccatggtagcgtctcg

SEQ ID NO: 7365 - DNA, 21 bp, synthetic construct
  misc_feature 1..21: note = Synthetic construct
  source 1..21: mol_type = other DNA
atagccatggtagcgtctcgc

SEQ ID NO: 7366 - DNA, 21 bp, synthetic construct
  misc_feature 1..21: note = Synthetic construct
  source 1..21: mol_type = other DNA
tagccatggtagcgtctcgct

SEQ ID NO: 7367 - DNA, 21 bp, synthetic construct
  misc_feature 1..21: note = Synthetic construct
  source 1..21: mol_type = other DNA
agccatggtagcgtctcgcta

SEQ ID NO: 7368 - DNA, 21 bp, synthetic construct
  misc_feature 1..21: note = Synthetic construct
  source 1..21: mol_type = other DNA
gccatggtagcgtctcgctaa

SEQ ID NO: 7369 - DNA, 21 bp, synthetic construct
  misc_feature 1..21: note = Synthetic construct
  source 1..21: mol_type = other DNA
ccatggtagcgtctcgctaaa

SEQ ID NO: 7370 - DNA, 21 bp, synthetic construct
  misc_feature 1..21: note = Synthetic construct
  source 1..21: mol_type = other DNA
catggtagcgtctcgctaaag

SEQ ID NO: 7371 - DNA, 21 bp, synthetic construct
  misc_feature 1..21: note = Synthetic construct
  source 1..21: mol_type = other DNA
atggtagcgtctcgctaaaga

SEQ ID NO: 7372 - DNA, 21 bp, synthetic construct
  misc_feature 1..21: note = Synthetic construct
  source 1..21: mol_type = other DNA
tggtagcgtctcgctaaagac

SEQ ID NO: 7373 - DNA, 21 bp, synthetic construct
  misc_feature 1..21: note = Synthetic construct
  source 1..21: mol_type = other DNA
ggtagcgtctcgctaaagaca

SEQ ID NO: 7374 - DNA, 21 bp, synthetic construct
  misc_feature 1..21: note = Synthetic construct
  source 1..21: mol_type = other DNA
gtagcgtctcgctaaagacat

SEQ ID NO: 7375 - DNA, 21 bp, synthetic construct
  misc_feature 1..21: note = Synthetic construct
  source 1..21: mol_type = other DNA
tagcgtctcgctaaagacatt

SEQ ID NO: 7376 - DNA, 21 bp, synthetic construct
  misc_feature 1..21: note = Synthetic construct
  source 1..21: mol_type = other DNA
agcgtctcgctaaagacatta

SEQ ID NO: 7377 - DNA, 21 bp, synthetic construct
  misc_feature 1..21: note = Synthetic construct
  source 1..21: mol_type = other DNA
gcgtctcgctaaagacattaa

SEQ ID NO: 7378 - DNA, 21 bp, synthetic construct
  misc_feature 1..21: note = Synthetic construct
  source 1..21: mol_type = other DNA
cgtctcgctaaagacattaaa

SEQ ID NO: 7379 - DNA, 21 bp, synthetic construct
  misc_feature 1..21: note = Synthetic construct
  source 1..21: mol_type = other DNA
gtctcgctaaagacattaaaa

SEQ ID NO: 7380 - DNA, 21 bp, synthetic construct
  misc_feature 1..21: note = Synthetic construct
  source 1..21: mol_type = other DNA
tctcgctaaagacattaaaaa

SEQ ID NO: 7381 - DNA, 21 bp, synthetic construct
  misc_feature 1..21: note = Synthetic construct
  source 1..21: mol_type = other DNA
ctcgctaaagacattaaaaat

SEQ ID NO: 7382 - DNA, 21 bp, synthetic construct
  misc_feature 1..21: note = Synthetic construct
  source 1..21: mol_type = other DNA
tcgctaaagacattaaaaatg

SEQ ID NO: 7383 - DNA, 21 bp, synthetic construct
  misc_feature 1..21: note = Synthetic construct
  source 1..21: mol_type = other DNA
cgctaaagacattaaaaatgg

SEQ ID NO: 7384 - DNA, 21 bp, synthetic construct
  misc_feature 1..21: note = Synthetic construct
  source 1..21: mol_type = other DNA
gctaaagacattaaaaatggc

SEQ ID NO: 7385 - DNA, 21 bp, synthetic construct
  misc_feature 1..21: note = Synthetic construct
  source 1..21: mol_type = other DNA
ctaaagacattaaaaatggca

SEQ ID NO: 7386 - DNA, 21 bp, synthetic construct
  misc_feature 1..21: note = Synthetic construct
  source 1..21: mol_type = other DNA
taaagacattaaaaatggcat

SEQ ID NO: 7387 - DNA, 21 bp, synthetic construct
  misc_feature 1..21: note = Synthetic construct
  source 1..21: mol_type = other DNA
aaagacattaaaaatggcatt

SEQ ID NO: 7388 - DNA, 21 bp, synthetic construct
  misc_feature 1..21: note = Synthetic construct
  source 1..21: mol_type = other DNA
aagacattaaaaatggcatta

SEQ ID NO: 7389 - DNA, 21 bp, synthetic construct
  misc_feature 1..21: note = Synthetic construct
  source 1..21: mol_type = other DNA
agacattaaaaatggcattag

SEQ ID NO: 7390 - DNA, 21 bp, synthetic construct
  misc_feature 1..21: note = Synthetic construct
  source 1..21: mol_type = other DNA
gacattaaaaatggcattagc

SEQ ID NO: 7391 - DNA, 21 bp, synthetic construct
  misc_feature 1..21: note = Synthetic construct
  source 1..21: mol_type = other DNA
acattaaaaatggcattagct

SEQ ID NO: 7392 - DNA, 21 bp, synthetic construct
  misc_feature 1..21: note = Synthetic construct
  source 1..21: mol_type = other DNA
cattaaaaatggcattagctc

SEQ ID NO: 7393 - DNA, 21 bp, synthetic construct
  misc_feature 1..21: note = Synthetic construct
  source 1..21: mol_type = other DNA
attaaaaatggcattagctcg

SEQ ID NO: 7394 - DNA, 21 bp, synthetic construct
  misc_feature 1..21: note = Synthetic construct
  source 1..21: mol_type = other DNA
ttaaaaatggcattagctcga

SEQ ID NO: 7395 - DNA, 21 bp, synthetic construct
  misc_feature 1..21: note = Synthetic construct
  source 1..21: mol_type = other DNA
taaaaatggcattagctcgac

SEQ ID NO: 7396 - DNA, 21 bp, synthetic construct
  misc_feature 1..21: note = Synthetic construct
  source 1..21: mol_type = other DNA
aaaaatggcattagctcgaca

SEQ ID NO: 7397 - DNA, 21 bp, synthetic construct
  misc_feature 1..21: note = Synthetic construct
  source 1..21: mol_type = other DNA
aaaatggcattagctcgacag

SEQ ID NO: 7398 - DNA, 21 bp, synthetic construct
  misc_feature 1..21: note = Synthetic construct
  source 1..21: mol_type = other DNA
aaatggcattagctcgacagg

SEQ ID NO: 7399 - DNA, 21 bp, synthetic construct
  misc_feature 1..21: note = Synthetic construct
  source 1..21: mol_type = other DNA
aatggcattagctcgacagga

SEQ ID NO: 7400 - DNA, 21 bp, synthetic construct
  misc_feature 1..21: note = Synthetic construct
  source 1..21: mol_type = other DNA
atggcattagctcgacaggaa

SEQ ID NO: 7401 - DNA, 21 bp, synthetic construct
  misc_feature 1..21: note = Synthetic construct
  source 1..21: mol_type = other DNA
tggcattagctcgacaggaag

SEQ ID NO: 7402 - DNA, 21 bp, synthetic construct
  misc_feature 1..21: note = Synthetic construct
  source 1..21: mol_type = other DNA
ggcattagctcgacaggaagt

SEQ ID NO: 7403 - DNA, 21 bp, synthetic construct
  misc_feature 1..21: note = Synthetic construct
  source 1..21: mol_type = other DNA
gcattagctcgacaggaagtt

SEQ ID NO: 7404 - DNA, 21 bp, synthetic construct
  misc_feature 1..21: note = Synthetic construct
  source 1..21: mol_type = other DNA
cattagctcgacaggaagttg

SEQ ID NO: 7405 - DNA, 21 bp, synthetic construct
  misc_feature 1..21: note = Synthetic construct
  source 1..21: mol_type = other DNA
attagctcgacaggaagttga

SEQ ID NO: 7406 - DNA, 21 bp, synthetic construct
  misc_feature 1..21: note = Synthetic construct
  source 1..21: mol_type = other DNA
ttagctcgacaggaagttgag

SEQ ID NO: 7407 - DNA, 21 bp, synthetic construct
  misc_feature 1..21: note = Synthetic construct
  source 1..21: mol_type = other DNA
tagctcgacaggaagttgagc

SEQ ID NO: 7408 - DNA, 21 bp, synthetic construct
  misc_feature 1..21: note = Synthetic construct
  source 1..21: mol_type = other DNA
agctcgacaggaagttgagca

SEQ ID NO: 7409 - DNA, 21 bp, synthetic construct
  misc_feature 1..21: note = Synthetic construct
  source 1..21: mol_type = other DNA
gctcgacaggaagttgagcag

SEQ ID NO: 7410 - DNA, 21 bp, synthetic construct
  misc_feature 1..21: note = Synthetic construct
  source 1..21: mol_type = other DNA
ctcgacaggaagttgagcagg

SEQ ID NO: 7411 - DNA, 21 bp, synthetic construct
  misc_feature 1..21: note = Synthetic construct
  source 1..21: mol_type = other DNA
tcgacaggaagttgagcagga

SEQ ID NO: 7412 - DNA, 21 bp, synthetic construct
  misc_feature 1..21: note = Synthetic construct
  source 1..21: mol_type = other DNA
cgacaggaagttgagcaggac

SEQ ID NO: 7413 - DNA, 21 bp, synthetic construct
  misc_feature 1..21: note = Synthetic construct
  source 1..21: mol_type = other DNA
gacaggaagttgagcaggacc

SEQ ID NO: 7414 - DNA, 21 bp, synthetic construct
  misc_feature 1..21: note = Synthetic construct
  source 1..21: mol_type = other DNA
acaggaagttgagcaggaccc

SEQ ID NO: 7415 - DNA, 21 bp, synthetic construct
  misc_feature 1..21: note = Synthetic construct
  source 1..21: mol_type = other DNA
caggaagttgagcaggacccc

SEQ ID NO: 7416 - DNA, 21 bp, synthetic construct
  misc_feature 1..21: note = Synthetic construct
  source 1..21: mol_type = other DNA
aggaagttgagcaggaccccg

SEQ ID NO: 7417 - DNA, 21 bp, synthetic construct
  misc_feature 1..21: note = Synthetic construct
  source 1..21: mol_type = other DNA
ggaagttgagcaggaccccga

SEQ ID NO: 7418 - DNA, 21 bp, synthetic construct
  misc_feature 1..21: note = Synthetic construct
  source 1..21: mol_type = other DNA
gaagttgagcaggaccccgaa

SEQ ID NO: 7419 - DNA, 21 bp, synthetic construct
  misc_feature 1..21: note = Synthetic construct
  source 1..21: mol_type = other DNA
aagttgagcaggaccccgaaa

SEQ ID NO: 7420 - DNA, 21 bp, synthetic construct
  misc_feature 1..21: note = Synthetic construct
  source 1..21: mol_type = other DNA
agttgagcaggaccccgaaag

SEQ ID NO: 7421 - DNA, 21 bp, synthetic construct
  misc_feature 1..21: note = Synthetic construct
  source 1..21: mol_type = other DNA
gttgagcaggaccccgaaagg

SEQ ID NO: 7422 - DNA, 21 bp, synthetic construct
  misc_feature 1..21: note = Synthetic construct
  source 1..21: mol_type = other DNA
ttgagcaggaccccgaaaggg

SEQ ID NO: 7423 - DNA, 21 bp, synthetic construct
  misc_feature 1..21: note = Synthetic construct
  source 1..21: mol_type = other DNA
tgagcaggaccccgaaagggg

SEQ ID NO: 7424 - DNA, 21 bp, synthetic construct
  misc_feature 1..21: note = Synthetic construct
  source 1..21: mol_type = other DNA
gagcaggaccccgaaaggggt

SEQ ID NO: 7425 - DNA, 21 bp, synthetic construct
  misc_feature 1..21: note = Synthetic construct
  source 1..21: mol_type = other DNA
agcaggaccccgaaaggggtc

SEQ ID NO: 7426 - DNA, 21 bp, synthetic construct
  misc_feature 1..21: note = Synthetic construct
  source 1..21: mol_type = other DNA
gcaggaccccgaaaggggtcc

SEQ ID NO: 7427 - DNA, 21 bp, synthetic construct
  misc_feature 1..21: note = Synthetic construct
  source 1..21: mol_type = other DNA
caggaccccgaaaggggtccc

SEQ ID NO: 7428 - DNA, 21 bp, synthetic construct
  misc_feature 1..21: note = Synthetic construct
  source 1..21: mol_type = other DNA
aggaccccgaaaggggtccca

SEQ ID NO: 7429 - DNA, 21 bp, synthetic construct
  misc_feature 1..21: note = Synthetic construct
  source 1..21: mol_type = other DNA
ggaccccgaaaggggtcccac

SEQ ID NO: 7430 - DNA, 21 bp, synthetic construct
  misc_feature 1..21: note = Synthetic construct
  source 1..21: mol_type = other DNA
gaccccgaaaggggtcccacc

SEQ ID NO: 7431 - DNA, 22 bp, synthetic construct
  misc_feature 1..22: note = Synthetic construct
  source 1..22: mol_type = other DNA
tgggtggtaactagccaagcag

SEQ ID NO: 7432 - DNA, 22 bp, synthetic construct
  misc_feature 1..22: note = Synthetic construct
  source 1..22: mol_type = other DNA
gggtggtaactagccaagcagc

SEQ ID NO: 7433 - DNA, 22 bp, synthetic construct
  misc_feature 1..22: note = Synthetic construct
  source 1..22: mol_type = other DNA
ggtggtaactagccaagcagct

SEQ ID NO: 7434 - DNA, 22 bp, synthetic construct
  misc_feature 1..22: note = Synthetic construct
  source 1..22: mol_type = other DNA
gtggtaactagccaagcagcta

SEQ ID NO: 7435 - DNA, 22 bp, synthetic construct
  misc_feature 1..22: note = Synthetic construct
  source 1..22: mol_type = other DNA
tggtaactagccaagcagctag

SEQ ID NO: 7436 - DNA, 22 bp, synthetic construct
  misc_feature 1..22: note = Synthetic construct
  source 1..22: mol_type = other DNA
ggtaactagccaagcagctagt

SEQ ID NO: 7437 - DNA, 22 bp, synthetic construct
  misc_feature 1..22: note = Synthetic construct
  source 1..22: mol_type = other DNA
gtaactagccaagcagctagtt

SEQ ID NO: 7438 - DNA, 22 bp, synthetic construct
  misc_feature 1..22: note = Synthetic construct
  source 1..22: mol_type = other DNA
taactagccaagcagctagtta

SEQ ID NO: 7439 - DNA, 22 bp, synthetic construct
  misc_feature 1..22: note = Synthetic construct
  source 1..22: mol_type = other DNA
aactagccaagcagctagttac

SEQ ID NO: 7440 - DNA, 22 bp, synthetic construct
  misc_feature 1..22: note = Synthetic construct
  source 1..22: mol_type = other DNA
actagccaagcagctagttacc

SEQ ID NO: 7441 - DNA, 22 bp, synthetic construct
  misc_feature 1..22: note = Synthetic construct
  source 1..22: mol_type = other DNA
ctagccaagcagctagttacca

SEQ ID NO: 7442 - DNA, 22 bp, synthetic construct
  misc_feature 1..22: note = Synthetic construct
  source 1..22: mol_type = other DNA
tagccaagcagctagttaccaa

SEQ ID NO: 7443 - DNA, 22 bp, synthetic construct
  misc_feature 1..22: note = Synthetic construct
  source 1..22: mol_type = other DNA
agccaagcagctagttaccaaa

SEQ ID NO: 7444 - DNA, 22 bp, synthetic construct
  misc_feature 1..22: note = Synthetic construct
  source 1..22: mol_type = other DNA
gccaagcagctagttaccaaat

SEQ ID NO: 7445 - DNA, 22 bp, synthetic construct
  misc_feature 1..22: note = Synthetic construct
  source 1..22: mol_type = other DNA
ccaagcagctagttaccaaatc

SEQ ID NO: 7446 - DNA, 22 bp, synthetic construct
  misc_feature 1..22: note = Synthetic construct
  source 1..22: mol_type = other DNA
caagcagctagttaccaaatcg

SEQ ID NO: 7447 - DNA, 22 bp, synthetic construct
  misc_feature 1..22: note = Synthetic construct
  source 1..22: mol_type = other DNA
aagcagctagttaccaaatcgg

SEQ ID NO: 7448 - DNA, 22 bp, synthetic construct
  misc_feature 1..22: note = Synthetic construct
  source 1..22: mol_type = other DNA
agcagctagttaccaaatcggg

SEQ ID NO: 7449 - DNA, 22 bp, synthetic construct
  misc_feature 1..22: note = Synthetic construct
  source 1..22: mol_type = other DNA
gcagctagttaccaaatcggga

SEQ ID NO: 7450 - DNA, 22 bp, synthetic construct
  misc_feature 1..22: note = Synthetic construct
  source 1..22: mol_type = other DNA
cagctagttaccaaatcgggag

SEQ ID NO: 7451 - DNA, 22 bp, synthetic construct
  misc_feature 1..22: note = Synthetic construct
  source 1..22: mol_type = other DNA
agctagttaccaaatcgggaga

SEQ ID NO: 7452 - DNA, 22 bp, synthetic construct
  misc_feature 1..22: note = Synthetic construct
  source 1..22: mol_type = other DNA
gctagttaccaaatcgggagaa

SEQ ID NO: 7453 - DNA, 22 bp, synthetic construct
  misc_feature 1..22: note = Synthetic construct
  source 1..22: mol_type = other DNA
ctagttaccaaatcgggagaat

SEQ ID NO: 7454 - DNA, 22 bp, synthetic construct
  misc_feature 1..22: note = Synthetic construct
  source 1..22: mol_type = other DNA
tagttaccaaatcgggagaatc

SEQ ID NO: 7455 - DNA, 22 bp, synthetic construct
  misc_feature 1..22: note = Synthetic construct
  source 1..22: mol_type = other DNA
agttaccaaatcgggagaatcc

SEQ ID NO: 7456 - DNA, 22 bp, synthetic construct
  misc_feature 1..22: note = Synthetic construct
  source 1..22: mol_type = other DNA
gttaccaaatcgggagaatccc

SEQ ID NO: 7457 - DNA, 22 bp, synthetic construct
  misc_feature 1..22: note = Synthetic construct
  source 1..22: mol_type = other DNA
ttaccaaatcgggagaatcccg

SEQ ID NO: 7458 - DNA, 22 bp, synthetic construct
  misc_feature 1..22: note = Synthetic construct
  source 1..22: mol_type = other DNA
taccaaatcgggagaatcccgg

SEQ ID NO: 7459 - DNA, 22 bp, synthetic construct
  misc_feature 1..22: note = Synthetic construct
  source 1..22: mol_type = other DNA
accaaatcgggagaatcccggg

SEQ ID NO: 7460 - DNA, 22 bp, synthetic construct
  misc_feature 1..22: note = Synthetic construct
  source 1..22: mol_type = other DNA
ccaaatcgggagaatcccgggt

SEQ ID NO: 7461 - DNA, 22 bp, synthetic construct
  misc_feature 1..22: note = Synthetic construct
  source 1..22: mol_type = other DNA
caaatcgggagaatcccgggtc

SEQ ID NO: 7462 - DNA, 22 bp, synthetic construct
  misc_feature 1..22: note = Synthetic construct
  source 1..22: mol_type = other DNA
aaatcgggagaatcccgggtcc

SEQ ID NO: 7463 - DNA, 22 bp, synthetic construct
  misc_feature 1..22: note = Synthetic construct
  source 1..22: mol_type = other DNA
aatcgggagaatcccgggtcct

SEQ ID NO: 7464 - DNA, 22 bp, synthetic construct
  misc_feature 1..22: note = Synthetic construct
  source 1..22: mol_type = other DNA
atcgggagaatcccgggtcctc

SEQ ID NO: 7465 - DNA, 22 bp, synthetic construct
  misc_feature 1..22: note = Synthetic construct
  source 1..22: mol_type = other DNA
tcgggagaatcccgggtcctct

SEQ ID NO: 7466 - DNA, 22 bp, synthetic construct
  misc_feature 1..22: note = Synthetic construct
  source 1..22: mol_type = other DNA
cgggagaatcccgggtcctctc

SEQ ID NO: 7467 - DNA, 22 bp, synthetic construct
  misc_feature 1..22: note = Synthetic construct
  source 1..22: mol_type = other DNA
gggagaatcccgggtcctctct

SEQ ID NO: 7468 - DNA, 22 bp, synthetic construct
  misc_feature 1..22: note = Synthetic construct
  source 1..22: mol_type = other DNA
ggagaatcccgggtcctctctt

SEQ ID NO: 7469 - DNA, 22 bp, synthetic construct
  misc_feature 1..22: note = Synthetic construct
  source 1..22: mol_type = other DNA
gagaatcccgggtcctctcttt

SEQ ID NO: 7470 - DNA, 22 bp, synthetic construct
  misc_feature 1..22: note = Synthetic construct
  source 1..22: mol_type = other DNA
agaatcccgggtcctctcttta

SEQ ID NO: 7471 - DNA, 22 bp, synthetic construct
  misc_feature 1..22: note = Synthetic construct
  source 1..22: mol_type = other DNA
gaatcccgggtcctctctttag

SEQ ID NO: 7472 - DNA, 22 bp, synthetic construct
  misc_feature 1..22: note = Synthetic construct
  source 1..22: mol_type = other DNA
aatcccgggtcctctctttagg

SEQ ID NO: 7473 - DNA, 22 bp, synthetic construct
  misc_feature 1..22: note = Synthetic construct
  source 1..22: mol_type = other DNA
atcccgggtcctctctttaggg

SEQ ID NO: 7474 - DNA, 22 bp, synthetic construct
  misc_feature 1..22: note = Synthetic construct
  source 1..22: mol_type = other DNA
tcccgggtcctctctttagggg

SEQ ID NO: 7475 - DNA, 22 bp, synthetic construct
  misc_feature 1..22: note = Synthetic construct
  source 1..22: mol_type = other DNA
cccgggtcctctctttaggggg

SEQ ID NO: 7476 - DNA, 22 bp, synthetic construct
  misc_feature 1..22: note = Synthetic construct
  source 1..22: mol_type = other DNA
ccgggtcctctctttaggggga

SEQ ID NO: 7477 - DNA, 22 bp, synthetic construct
  misc_feature 1..22: note = Synthetic construct
  source 1..22: mol_type = other DNA
cgggtcctctctttagggggag

SEQ ID NO: 7478 - DNA, 22 bp, synthetic construct
  misc_feature 1..22: note = Synthetic construct
  source 1..22: mol_type = other DNA
gggtcctctctttagggggagg

SEQ ID NO: 7479 - DNA, 22 bp, synthetic construct
  misc_feature 1..22: note = Synthetic construct
  source 1..22: mol_type = other DNA
ggtcctctctttagggggaggt

SEQ ID NO: 7480 - DNA, 22 bp, synthetic construct
  misc_feature 1..22: note = Synthetic construct
  source 1..22: mol_type = other DNA
gtcctctctttagggggaggtc

SEQ ID NO: 7481 - DNA, 22 bp, synthetic construct
  misc_feature 1..22: note = Synthetic construct
  source 1..22: mol_type = other DNA
tcctctctttagggggaggtcc

SEQ ID NO: 7482 - DNA, 22 bp, synthetic construct
  misc_feature 1..22: note = Synthetic construct
  source 1..22: mol_type = other DNA
cctctctttagggggaggtccc

SEQ ID NO: 7483 - DNA, 22 bp, synthetic construct
  misc_feature 1..22: note = Synthetic construct
  source 1..22: mol_type = other DNA
ctctctttagggggaggtccct

SEQ ID NO: 7484 - DNA, 22 bp, synthetic construct
  misc_feature 1..22: note = Synthetic construct
  source 1..22: mol_type = other DNA
tctctttagggggaggtccctg

SEQ ID NO: 7485 - DNA, 22 bp, synthetic construct
  misc_feature 1..22: note = Synthetic construct
  source 1..22: mol_type = other DNA
ctctttagggggaggtccctgg

SEQ ID NO: 7486 - DNA, 22 bp, synthetic construct
  misc_feature 1..22: note = Synthetic construct
  source 1..22: mol_type = other DNA
tctttagggggaggtccctggg

SEQ ID NO: 7487 - DNA, 22 bp, synthetic construct
  misc_feature 1..22: note = Synthetic construct
  source 1..22: mol_type = other DNA
ctttagggggaggtccctgggc

SEQ ID NO: 7488 - DNA, 22 bp, synthetic construct
  misc_feature 1..22: note = Synthetic construct
  source 1..22: mol_type = other DNA
tttagggggaggtccctgggcc

SEQ ID NO: 7489 - DNA, 22 bp, synthetic construct
  misc_feature 1..22: note = Synthetic construct
  source 1..22: mol_type = other DNA
ttagggggaggtccctgggccg

SEQ ID NO: 7490 - DNA, 22 bp, synthetic construct
  misc_feature 1..22: note = Synthetic construct
  source 1..22: mol_type = other DNA
tagggggaggtccctgggccga

SEQ ID NO: 7491 - DNA, 22 bp, synthetic construct
  misc_feature 1..22: note = Synthetic construct
  source 1..22: mol_type = other DNA
agggggaggtccctgggccgaa

SEQ ID NO: 7492 - DNA, 22 bp, synthetic construct
  misc_feature 1..22: note = Synthetic construct
  source 1..22: mol_type = other DNA
gggggaggtccctgggccgaag

SEQ ID NO: 7493 - DNA, 22 bp, synthetic construct
  misc_feature 1..22: note = Synthetic construct
  source 1..22: mol_type = other DNA
ggggaggtccctgggccgaagc

SEQ ID NO: 7494 - DNA, 22 bp, synthetic construct
  misc_feature 1..22: note = Synthetic construct
  source 1..22: mol_type = other DNA
gggaggtccctgggccgaagcc

SEQ ID NO: 7495 - DNA, 22 bp, synthetic construct
  misc_feature 1..22: note = Synthetic construct
  source 1..22: mol_type = other DNA
ggaggtccctgggccgaagccc

SEQ ID NO: 7496 - DNA, 22 bp, synthetic construct
  misc_feature 1..22: note = Synthetic construct
  source 1..22: mol_type = other DNA
gaggtccctgggccgaagcccg

SEQ ID NO: 7497 - DNA, 22 bp, synthetic construct
  misc_feature 1..22: note = Synthetic construct
  source 1..22: mol_type = other DNA
aggtccctgggccgaagcccgc

SEQ ID NO: 7498 - DNA, 22 bp, synthetic construct
  misc_feature 1..22: note = Synthetic construct
  source 1..22: mol_type = other DNA
ggtccctgggccgaagcccgcc

SEQ ID NO: 7499 - DNA, 22 bp, synthetic construct
  misc_feature 1..22: note = Synthetic construct
  source 1..22: mol_type = other DNA
gtccctgggccgaagcccgccc

SEQ ID NO: 7500 - DNA, 22 bp, synthetic construct
  misc_feature 1..22: note = Synthetic construct
  source 1..22: mol_type = other DNA
tccctgggccgaagcccgccca

SEQ ID NO: 7501 - DNA, 22 bp, synthetic construct
  misc_feature 1..22: note = Synthetic construct
  source 1..22: mol_type = other DNA
ccctgggccgaagcccgcccac

SEQ ID NO: 7502 - DNA, 22 bp, synthetic construct
  misc_feature 1..22: note = Synthetic construct
  source 1..22: mol_type = other DNA
cctgggccgaagcccgcccacc

SEQ ID NO: 7503 - DNA, 22 bp, synthetic construct
  misc_feature 1..22: note = Synthetic construct
  source 1..22: mol_type = other DNA
ctgggccgaagcccgcccacct

SEQ ID NO: 7504 - DNA, 22 bp, synthetic construct
  misc_feature 1..22: note = Synthetic construct
  source 1..22: mol_type = other DNA
tgggccgaagcccgcccacctt

SEQ ID NO: 7505 - DNA, 22 bp, synthetic construct
  misc_feature 1..22: note = Synthetic construct
  source 1..22: mol_type = other DNA
gggccgaagcccgcccaccttt

SEQ ID NO: 7506 - DNA, 22 bp, synthetic construct
  misc_feature 1..22: note = Synthetic construct
  source 1..22: mol_type = other DNA
ggccgaagcccgcccacctttc

SEQ ID NO: 7507 - DNA, 22 bp, synthetic construct
  misc_feature 1..22: note = Synthetic construct
  source 1..22: mol_type = other DNA
gccgaagcccgcccacctttcg

SEQ ID NO: 7508 - DNA, 22 bp, synthetic construct
  misc_feature 1..22: note = Synthetic construct
  source 1..22: mol_type = other DNA
ccgaagcccgcccacctttcgg

SEQ ID NO: 7509 - DNA, 22 bp, synthetic construct
  misc_feature 1..22: note = Synthetic construct
  source 1..22: mol_type = other DNA
cgaagcccgcccacctttcggt

SEQ ID NO: 7510 - DNA, 22 bp, synthetic construct
  misc_feature 1..22: note = Synthetic construct
  source 1..22: mol_type = other DNA
gaagcccgcccacctttcggtg

SEQ ID NO: 7511 - DNA, 22 bp, synthetic construct
  misc_feature 1..22: note = Synthetic construct
  source 1..22: mol_type = other DNA
aagcccgcccacctttcggtgg

SEQ ID NO: 7512 - DNA, 22 bp, synthetic construct
  misc_feature 1..22: note = Synthetic construct
  source 1..22: mol_type = other DNA
agcccgcccacctttcggtgga

SEQ ID NO: 7513 - DNA, 22 bp, synthetic construct
  misc_feature 1..22: note = Synthetic construct
  source 1..22: mol_type = other DNA
gcccgcccacctttcggtggag

SEQ ID NO: 7514 - DNA, 22 bp, synthetic construct
  misc_feature 1..22: note = Synthetic construct
  source 1..22: mol_type = other DNA
cccgcccacctttcggtggagc

SEQ ID NO: 7515 - DNA, 22 bp, synthetic construct
  misc_feature 1..22: note = Synthetic construct
  source 1..22: mol_type = other DNA
ccgcccacctttcggtggagcc

SEQ ID NO: 7516 - DNA, 22 bp, synthetic construct
  misc_feature 1..22: note = Synthetic construct
  source 1..22: mol_type = other DNA
cgcccacctttcggtggagccg

SEQ ID NO: 7517 - DNA, 22 bp, synthetic construct
  misc_feature 1..22: note = Synthetic construct
  source 1..22: mol_type = other DNA
gcccacctttcggtggagccgg

SEQ ID NO: 7518 - DNA, 22 bp, synthetic construct
  misc_feature 1..22: note = Synthetic construct
  source 1..22: mol_type = other DNA
cccacctttcggtggagccgga

SEQ ID NO: 7519 - DNA, 22 bp, synthetic construct
  misc_feature 1..22: note = Synthetic construct
  source 1..22: mol_type = other DNA
ccacctttcggtggagccggac

SEQ ID NO: 7520 - DNA, 22 bp, synthetic construct
  misc_feature 1..22: note = Synthetic construct
  source 1..22: mol_type = other DNA
cacctttcggtggagccggacc

SEQ ID NO: 7521 - DNA, 22 bp, synthetic construct
  misc_feature 1..22: note = Synthetic construct
  source 1..22: mol_type = other DNA
acctttcggtggagccggaccg

SEQ ID NO: 7522 - DNA, 22 bp, synthetic construct
  misc_feature 1..22: note = Synthetic construct
  source 1..22: mol_type = other DNA
cctttcggtggagccggaccgc

SEQ ID NO: 7523 - DNA, 22 bp, synthetic construct
  misc_feature 1..22: note = Synthetic construct
  source 1..22: mol_type = other DNA
ctttcggtggagccggaccgct

SEQ ID NO: 7524 - DNA, 22 bp, synthetic construct
  misc_feature 1..22: note = Synthetic construct
  source 1..22: mol_type = other DNA
tttcggtggagccggaccgctt

SEQ ID NO: 7525 - DNA, 22 bp, synthetic construct
  misc_feature 1..22: note = Synthetic construct
  source 1..22: mol_type = other DNA
ttcggtggagccggaccgcttt

SEQ ID NO: 7526 - DNA, 22 bp, synthetic construct
  misc_feature 1..22: note = Synthetic construct
  source 1..22: mol_type = other DNA
tcggtggagccggaccgctttc

SEQ ID NO: 7527 - DNA, 22 bp, synthetic construct
  misc_feature 1..22: note = Synthetic construct
  source 1..22: mol_type = other DNA
cggtggagccggaccgctttcg

SEQ ID NO: 7528 - DNA, 22 bp, synthetic construct
  misc_feature 1..22: note = Synthetic construct
  source 1..22: mol_type = other DNA
ggtggagccggaccgctttcgc

SEQ ID NO: 7529 - DNA, 22 bp, synthetic construct
  misc_feature 1..22: note = Synthetic construct
  source 1..22: mol_type = other DNA
gtggagccggaccgctttcgca

SEQ ID NO: 7530 - DNA, 22 bp, synthetic construct
  misc_feature 1..22: note = Synthetic construct
  source 1..22: mol_type = other DNA
tggagccggaccgctttcgcac

SEQ ID NO: 7531 - DNA, 22 bp, synthetic construct
  misc_feature 1..22: note = Synthetic construct
  source 1..22: mol_type = other DNA
ggagccggaccgctttcgcacc

SEQ ID NO: 7532 - DNA, 22 bp, synthetic construct
  misc_feature 1..22: note = Synthetic construct
  source 1..22: mol_type = other DNA
gagccggaccgctttcgcaccc

SEQ ID NO: 7533 - DNA, 22 bp, synthetic construct
  misc_feature 1..22: note = Synthetic construct
  source 1..22: mol_type = other DNA
agccggaccgctttcgcacccg

SEQ ID NO: 7534 - DNA, 22 bp, synthetic construct
  misc_feature 1..22: note = Synthetic construct
  source 1..22: mol_type = other DNA
gccggaccgctttcgcacccgt

SEQ ID NO: 7535 - DNA, 22 bp, synthetic construct
  misc_feature 1..22: note = Synthetic construct
  source 1..22: mol_type = other DNA
ccggaccgctttcgcacccgtg

SEQ ID NO: 7536 - DNA, 22 bp, synthetic construct
  misc_feature 1..22: note = Synthetic construct
  source 1..22: mol_type = other DNA
cggaccgctttcgcacccgtgc

SEQ ID NO: 7537 - DNA, 22 bp, synthetic construct
  misc_feature 1..22: note = Synthetic construct
  source 1..22: mol_type = other DNA
ggaccgctttcgcacccgtgct

SEQ ID NO: 7538 - DNA, 22 bp, synthetic construct
  misc_feature 1..22: note = Synthetic construct
  source 1..22: mol_type = other DNA
gaccgctttcgcacccgtgctc

SEQ ID NO: 7539 - DNA, 22 bp, synthetic construct
  misc_feature 1..22: note = Synthetic construct
  source 1..22: mol_type = other DNA
accgctttcgcacccgtgctct

SEQ ID NO: 7540 - DNA, 22 bp, synthetic construct
  misc_feature 1..22: note = Synthetic construct
  source 1..22: mol_type = other DNA
ccgctttcgcacccgtgctctt

SEQ ID NO: 7541 - DNA, 22 bp, synthetic construct
  misc_feature 1..22: note = Synthetic construct
  source 1..22: mol_type = other DNA
cgctttcgcacccgtgctcttt

SEQ ID NO: 7542 - DNA, 22 bp, synthetic construct
  misc_feature 1..22: note = Synthetic construct
  source 1..22: mol_type = other DNA
gctttcgcacccgtgctctttc

SEQ ID NO: 7543 - DNA, 22 bp, synthetic construct
  misc_feature 1..22: note = Synthetic construct
  source 1..22: mol_type = other DNA
ctttcgcacccgtgctctttcg

SEQ ID NO: 7544 - DNA, 22 bp, synthetic construct
  misc_feature 1..22: note = Synthetic construct
  source 1..22: mol_type = other DNA
tttcgcacccgtgctctttcga

SEQ ID NO: 7545 - DNA, 22 bp, synthetic construct
  misc_feature 1..22: note = Synthetic construct
  source 1..22: mol_type = other DNA
ttcgcacccgtgctctttcgag

SEQ ID NO: 7546 - DNA, 22 bp, synthetic construct
  misc_feature 1..22: note = Synthetic construct
  source 1..22: mol_type = other DNA
tcgcacccgtgctctttcgagc

SEQ ID NO: 7547 - DNA, 22 bp, synthetic construct
  misc_feature 1..22: note = Synthetic construct
  source 1..22: mol_type = other DNA
cgcacccgtgctctttcgagca

SEQ ID NO: 7548 - DNA, 22 bp, synthetic construct
  misc_feature 1..22: note = Synthetic construct
  source 1..22: mol_type = other DNA
gcacccgtgctctttcgagcac

SEQ ID NO: 7549 - DNA, 22 bp, synthetic construct
  misc_feature 1..22: note = Synthetic construct
  source 1..22: mol_type = other DNA
cacccgtgctctttcgagcaca

SEQ ID NO: 7550 - DNA, 22 bp, synthetic construct
  misc_feature 1..22: note = Synthetic construct
  source 1..22: mol_type = other DNA
acccgtgctctttcgagcacac

SEQ ID NO: 7551 - DNA, 22 bp, synthetic construct
  misc_feature 1..22: note = Synthetic construct
  source 1..22: mol_type = other DNA
cccgtgctctttcgagcacacc

SEQ ID NO: 7552 - DNA, 22 bp, synthetic construct
  misc_feature 1..22: note = Synthetic construct
  source 1..22: mol_type = other DNA
ccgtgctctttcgagcacaccc

SEQ ID NO: 7553 - DNA, 22 bp, synthetic construct
  misc_feature 1..22: note = Synthetic construct
  source 1..22: mol_type = other DNA
cgtgctctttcgagcacaccca

SEQ ID NO: 7554 - DNA, 22 bp, synthetic construct
  misc_feature 1..22: note = Synthetic construct
  source 1..22: mol_type = other DNA
gtgctctttcgagcacacccac

SEQ ID NO: 7555 - DNA, 22 bp, synthetic construct
  misc_feature 1..22: note = Synthetic construct
  source 1..22: mol_type = other DNA
tgctctttcgagcacacccacc

SEQ ID NO: 7556 - DNA, 22 bp, synthetic construct
  misc_feature 1..22: note = Synthetic construct
  source 1..22: mol_type = other DNA
gctctttcgagcacacccaccc

SEQ ID NO: 7557 - DNA, 22 bp, synthetic construct
  misc_feature 1..22: note = Synthetic construct
  source 1..22: mol_type = other DNA
ctctttcgagcacacccacccc

SEQ ID NO: 7558 - DNA, 22 bp, synthetic construct
  misc_feature 1..22: note = Synthetic construct
  source 1..22: mol_type = other DNA
tctttcgagcacacccaccccg

SEQ ID NO: 7559 - DNA, 22 bp, synthetic construct
  misc_feature 1..22: note = Synthetic construct
  source 1..22: mol_type = other DNA
ctttcgagcacacccaccccgt

SEQ ID NO: 7560 - DNA, 22 bp, synthetic construct
  misc_feature 1..22: note = Synthetic construct
  source 1..22: mol_type = other DNA
tttcgagcacacccaccccgtt

SEQ ID NO: 7561 - DNA, 22 bp, synthetic construct
  misc_feature 1..22: note = Synthetic construct
  source 1..22: mol_type = other DNA
ttcgagcacacccaccccgttt

SEQ ID NO: 7562 - DNA, 22 bp, synthetic construct
  misc_feature 1..22: note = Synthetic construct
  source 1..22: mol_type = other DNA
tcgagcacacccaccccgttta

SEQ ID NO: 7563 - DNA, 22 bp, synthetic construct
  misc_feature 1..22: note = Synthetic construct
  source 1..22: mol_type = other DNA
cgagcacacccaccccgtttac

SEQ ID NO: 7564 - DNA, 22 bp, synthetic construct
  misc_feature 1..22: note = Synthetic construct
  source 1..22: mol_type = other DNA
gagcacacccaccccgtttacg

SEQ ID NO: 7565 - DNA, 22 bp, synthetic construct
  misc_feature 1..22: note = Synthetic construct
  source 1..22: mol_type = other DNA
agcacacccaccccgtttacgg

SEQ ID NO: 7566 - DNA, 22 bp, synthetic construct
  misc_feature 1..22: note = Synthetic construct
  source 1..22: mol_type = other DNA
gcacacccaccccgtttacggg

SEQ ID NO: 7567 - DNA, 22 bp, synthetic construct
  misc_feature 1..22: note = Synthetic construct
  source 1..22: mol_type = other DNA
cacacccaccccgtttacgggg

SEQ ID NO: 7568 - DNA, 22 bp, synthetic construct
  misc_feature 1..22: note = Synthetic construct
  source 1..22: mol_type = other DNA
acacccaccccgtttacggggg

SEQ ID NO: 7569 - DNA, 22 bp, synthetic construct
  misc_feature 1..22: note = Synthetic construct
  source 1..22: mol_type = other DNA
cacccaccccgtttacgggggt

SEQ ID NO: 7570 - DNA, 22 bp, synthetic construct
  misc_feature 1..22: note = Synthetic construct
  source 1..22: mol_type = other DNA
acccaccccgtttacgggggtc

SEQ ID NO: 7571 - DNA, 22 bp, synthetic construct
  misc_feature 1..22: note = Synthetic construct
  source 1..22: mol_type = other DNA
cccaccccgtttacgggggtcc

SEQ ID NO: 7572 - DNA, 22 bp, synthetic construct
  misc_feature 1..22: note = Synthetic construct
  source 1..22: mol_type = other DNA
ccaccccgtttacgggggtccc

SEQ ID NO: 7573 - DNA, 22 bp, synthetic construct
  misc_feature 1..22: note = Synthetic construct
  source 1..22: mol_type = other DNA
caccccgtttacgggggtccct

SEQ ID NO: 7574 - DNA, 22 bp, synthetic construct
  misc_feature 1..22: note = Synthetic construct
  source 1..22: mol_type = other DNA
accccgtttacgggggtccctc

SEQ ID NO: 7575 - DNA, 22 bp, synthetic construct
  misc_feature 1..22: note = Synthetic construct
  source 1..22: mol_type = other DNA
ccccgtttacgggggtccctcg

SEQ ID NO: 7576 - DNA, 22 bp, synthetic construct
  misc_feature 1..22: note = Synthetic construct
  source 1..22: mol_type = other DNA
cccgtttacgggggtccctcgg

SEQ ID NO: 7577 - DNA, 22 bp, synthetic construct
  misc_feature 1..22: note = Synthetic construct
  source 1..22: mol_type = other DNA
ccgtttacgggggtccctcggt

SEQ ID NO: 7578 - DNA, 22 bp, synthetic construct
  misc_feature 1..22: note = Synthetic construct
  source 1..22: mol_type = other DNA
cgtttacgggggtccctcggtc

SEQ ID NO: 7579 - DNA, 22 bp, synthetic construct
  misc_feature 1..22: note = Synthetic construct
  source 1..22: mol_type = other DNA
gtttacgggggtccctcggtca

SEQ ID NO: 7580 - DNA, 22 bp, synthetic construct
  misc_feature 1..22: note = Synthetic construct
  source 1..22: mol_type = other DNA
tttacgggggtccctcggtcag

SEQ ID NO: 7581 - DNA, 22 bp, synthetic construct
  misc_feature 1..22: note = Synthetic construct
  source 1..22: mol_type = other DNA
ttacgggggtccctcggtcagc

SEQ ID NO: 7582 - DNA, 22 bp, synthetic construct
  misc_feature 1..22: note = Synthetic construct
  source 1..22: mol_type = other DNA
tacgggggtccctcggtcagct

SEQ ID NO: 7583 - DNA, 22 bp, synthetic construct
  misc_feature 1..22: note = Synthetic construct
  source 1..22: mol_type = other DNA
acgggggtccctcggtcagcta

SEQ ID NO: 7584 - DNA, 22 bp, synthetic construct
  misc_feature 1..22: note = Synthetic construct
  source 1..22: mol_type = other DNA
cgggggtccctcggtcagctac

SEQ ID NO: 7585 - DNA, 22 bp, synthetic construct
  misc_feature 1..22: note = Synthetic construct
  source 1..22: mol_type = other DNA
gggggtccctcggtcagctacc

SEQ ID NO: 7586 - DNA, 22 bp, synthetic construct
  misc_feature 1..22: note = Synthetic construct
  source 1..22: mol_type = other DNA
ggggtccctcggtcagctaccg

SEQ ID NO: 7587 - DNA, 22 bp, synthetic construct
  misc_feature 1..22: note = Synthetic construct
  source 1..22: mol_type = other DNA
gggtccctcggtcagctaccga

SEQ ID NO: 7588 - DNA, 22 bp, synthetic construct
  misc_feature 1..22: note = Synthetic construct
  source 1..22: mol_type = other DNA
ggtccctcggtcagctaccgag

SEQ ID NO: 7589 - DNA, 22 bp, synthetic construct
  misc_feature 1..22: note = Synthetic construct
  source 1..22: mol_type = other DNA
gtccctcggtcagctaccgagg

SEQ ID NO: 7590 - DNA, 22 bp, synthetic construct
  misc_feature 1..22: note = Synthetic construct
  source 1..22: mol_type = other DNA
tccctcggtcagctaccgagga

SEQ ID NO: 7591 - DNA, 22 bp, synthetic construct
  misc_feature 1..22: note = Synthetic construct
  source 1..22: mol_type = other DNA
ccctcggtcagctaccgaggag

SEQ ID NO: 7592 - DNA, 22 bp, synthetic construct
  misc_feature 1..22: note = Synthetic construct
  source 1..22: mol_type = other DNA
cctcggtcagctaccgaggaga

SEQ ID NO: 7593 - DNA, 22 bp, synthetic construct
  misc_feature 1..22: note = Synthetic construct
  source 1..22: mol_type = other DNA
ctcggtcagctaccgaggagag

SEQ ID NO: 7594 - DNA, 22 bp, synthetic construct
  misc_feature 1..22: note = Synthetic construct
  source 1..22: mol_type = other DNA
tcggtcagctaccgaggagagc

SEQ ID NO: 7595 - DNA, 22 bp, synthetic construct
  misc_feature 1..22: note = Synthetic construct
  source 1..22: mol_type = other DNA
cggtcagctaccgaggagagct

SEQ ID NO: 7596 - DNA, 22 bp, synthetic construct
  misc_feature 1..22: note = Synthetic construct
  source 1..22: mol_type = other DNA
ggtcagctaccgaggagagctc

SEQ ID NO: 7597 - DNA, 22 bp, synthetic construct
  misc_feature 1..22: note = Synthetic construct
  source 1..22: mol_type = other DNA
gtcagctaccgaggagagctcg

SEQ ID NO: 7598 - DNA, 22 bp, synthetic construct
  misc_feature 1..22: note = Synthetic construct
  source 1..22: mol_type = other DNA
tcagctaccgaggagagctcgc

SEQ ID NO: 7599 - DNA, 22 bp, synthetic construct
  misc_feature 1..22: note = Synthetic construct
  source 1..22: mol_type = other DNA
cagctaccgaggagagctcgct

SEQ ID NO: 7600 - DNA, 22 bp, synthetic construct
  misc_feature 1..22: note = Synthetic construct
  source 1..22: mol_type = other DNA
agctaccgaggagagctcgctg

SEQ ID NO: 7601 - DNA, 22 bp, synthetic construct
  misc_feature 1..22: note = Synthetic construct
  source 1..22: mol_type = other DNA
gctaccgaggagagctcgctgg

SEQ ID NO: 7602 - DNA, 22 bp, synthetic construct
  misc_feature 1..22: note = Synthetic construct
  source 1..22: mol_type = other DNA
ctaccgaggagagctcgctggc

SEQ ID NO: 7603 - DNA, 22 bp, synthetic construct
  misc_feature 1..22: note = Synthetic construct
  source 1..22: mol_type = other DNA
taccgaggagagctcgctggcc

SEQ ID NO: 7604 - DNA, 22 bp, synthetic construct
  misc_feature 1..22: note = Synthetic construct
  source 1..22: mol_type = other DNA
accgaggagagctcgctggccc

SEQ ID NO: 7605 - DNA, 22 bp, synthetic construct
  misc_feature 1..22: note = Synthetic construct
  source 1..22: mol_type = other DNA
ccgaggagagctcgctggccca

SEQ ID NO: 7606 - DNA, 22 bp, synthetic construct
  misc_feature 1..22: note = Synthetic construct
  source 1..22: mol_type = other DNA
cgaggagagctcgctggcccac

SEQ ID NO: 7607 - DNA, 22 bp, synthetic construct
  misc_feature 1..22: note = Synthetic construct
  source 1..22: mol_type = other DNA
gaggagagctcgctggcccaca

SEQ ID NO: 7608 - DNA, 22 bp, synthetic construct
  misc_feature 1..22: note = Synthetic construct
  source 1..22: mol_type = other DNA
aggagagctcgctggcccacac

SEQ ID NO: 7609 - DNA, 22 bp, synthetic construct
  misc_feature 1..22: note = Synthetic construct
  source 1..22: mol_type = other DNA
ggagagctcgctggcccacact

SEQ ID NO: 7610 - DNA, 22 bp, synthetic construct
  misc_feature 1..22: note = Synthetic construct
  source 1..22: mol_type = other DNA
gagagctcgctggcccacactc

SEQ ID NO: 7611 - DNA, 22 bp, synthetic construct
  misc_feature 1..22: note = Synthetic construct
  source 1..22: mol_type = other DNA
agagctcgctggcccacactcc

SEQ ID NO: 7612 - DNA, 22 bp, synthetic construct
  misc_feature 1..22: note = Synthetic construct
  source 1..22: mol_type = other DNA
gagctcgctggcccacactcct

SEQ ID NO: 7613 - DNA, 22 bp, synthetic construct
  misc_feature 1..22: note = Synthetic construct
  source 1..22: mol_type = other DNA
agctcgctggcccacactcctg

SEQ ID NO: 7614 - DNA, 22 bp, synthetic construct
  misc_feature 1..22: note = Synthetic construct
  source 1..22: mol_type = other DNA
gctcgctggcccacactcctga

SEQ ID NO: 7615 - DNA, 22 bp, synthetic construct
  misc_feature 1..22: note = Synthetic construct
  source 1..22: mol_type = other DNA
ctcgctggcccacactcctgag

SEQ ID NO: 7616 - DNA, 22 bp, synthetic construct
  misc_feature 1..22: note = Synthetic construct
  source 1..22: mol_type = other DNA
tcgctggcccacactcctgagg

SEQ ID NO: 7617 - DNA, 22 bp, synthetic construct
  misc_feature 1..22: note = Synthetic construct
  source 1..22: mol_type = other DNA
cgctggcccacactcctgaggg

SEQ ID NO: 7618 - DNA, 22 bp, synthetic construct
  misc_feature 1..22: note = Synthetic construct
  source 1..22: mol_type = other DNA
gctggcccacactcctgaggga

SEQ ID NO: 7619 - DNA, 22 bp, synthetic construct
  misc_feature 1..22: note = Synthetic construct
  source 1..22: mol_type = other DNA
ctggcccacactcctgagggaa

SEQ ID NO: 7620 - DNA, 22 bp, synthetic construct
  misc_feature 1..22: note = Synthetic construct
  source 1..22: mol_type = other DNA
tggcccacactcctgagggaat

SEQ ID NO: 7621 - DNA, 22 bp, synthetic construct
  misc_feature 1..22: note = Synthetic construct
  source 1..22: mol_type = other DNA
ggcccacactcctgagggaatg

SEQ ID NO: 7622 - DNA, 22 bp, synthetic construct
  misc_feature 1..22: note = Synthetic construct
  source 1..22: mol_type = other DNA
gcccacactcctgagggaatgt

SEQ ID NO: 7623 - DNA, 22 bp, synthetic construct
  misc_feature 1..22: note = Synthetic construct
  source 1..22: mol_type = other DNA
cccacactcctgagggaatgtg

SEQ ID NO: 7624 - DNA, 22 bp, synthetic construct
  misc_feature 1..22: note = Synthetic construct
  source 1..22: mol_type = other DNA
ccacactcctgagggaatgtgg

SEQ ID NO: 7625 - DNA, 22 bp, synthetic construct
  misc_feature 1..22: note = Synthetic construct
  source 1..22: mol_type = other DNA
cacactcctgagggaatgtggg

SEQ ID NO: 7626 - DNA, 22 bp, synthetic construct
  misc_feature 1..22: note = Synthetic construct
  source 1..22: mol_type = other DNA
acactcctgagggaatgtggga

SEQ ID NO: 7627 - DNA, 22 bp, synthetic construct
  misc_feature 1..22: note = Synthetic construct
  source 1..22: mol_type = other DNA
cactcctgagggaatgtgggaa

SEQ ID NO: 7628 - DNA, 22 bp, synthetic construct
  misc_feature 1..22: note = Synthetic construct
  source 1..22: mol_type = other DNA
actcctgagggaatgtgggaac

SEQ ID NO: 7629 - DNA, 22 bp, synthetic construct
  misc_feature 1..22: note = Synthetic construct
  source 1..22: mol_type = other DNA
ctcctgagggaatgtgggaacc

SEQ ID NO: 7630 - DNA, 22 bp, synthetic construct
  misc_feature 1..22: note = Synthetic construct
  source 1..22: mol_type = other DNA
tcctgagggaatgtgggaaccg

SEQ ID NO: 7631 - DNA, 22 bp, synthetic construct
  misc_feature 1..22: note = Synthetic construct
  source 1..22: mol_type = other DNA
cctgagggaatgtgggaaccgg

SEQ ID NO: 7632 - DNA, 22 bp, synthetic construct
  misc_feature 1..22: note = Synthetic construct
  source 1..22: mol_type = other DNA
ctgagggaatgtgggaaccggc

SEQ ID NO: 7633 - DNA, 22 bp, synthetic construct
  misc_feature 1..22: note = Synthetic construct
  source 1..22: mol_type = other DNA
tgagggaatgtgggaaccggcg

SEQ ID NO: 7634 - DNA, 22 bp, synthetic construct
  misc_feature 1..22: note = Synthetic construct
  source 1..22: mol_type = other DNA
gagggaatgtgggaaccggcgt

SEQ ID NO: 7635 - DNA, 22 bp, synthetic construct
  misc_feature 1..22: note = Synthetic construct
  source 1..22: mol_type = other DNA
agggaatgtgggaaccggcgtt

SEQ ID NO: 7636 - DNA, 22 bp, synthetic construct
  misc_feature 1..22: note = Synthetic construct
  source 1..22: mol_type = other DNA
gggaatgtgggaaccggcgtta

SEQ ID NO: 7637 - DNA, 22 bp, synthetic construct
  misc_feature 1..22: note = Synthetic construct
  source 1..22: mol_type = other DNA
ggaatgtgggaaccggcgttag

SEQ ID NO: 7638 - DNA, 22 bp, synthetic construct
  misc_feature 1..22: note = Synthetic construct
  source 1..22: mol_type = other DNA
gaatgtgggaaccggcgttagc

SEQ ID NO: 7639 - DNA, 22 bp, synthetic construct
  misc_feature 1..22: note = Synthetic construct
  source 1..22: mol_type = other DNA
aatgtgggaaccggcgttagcc

SEQ ID NO: 7640 - DNA, 22 bp, synthetic construct
  misc_feature 1..22: note = Synthetic construct
  source 1..22: mol_type = other DNA
atgtgggaaccggcgttagcca

SEQ ID NO: 7641 - DNA, 22 bp, synthetic construct
  misc_feature 1..22: note = Synthetic construct
  source 1..22: mol_type = other DNA
tgtgggaaccggcgttagccac

SEQ ID NO: 7642 - DNA, 22 bp, synthetic construct
  misc_feature 1..22: note = Synthetic construct
  source 1..22: mol_type = other DNA
gtgggaaccggcgttagccact

SEQ ID NO: 7643 - DNA, 22 bp, synthetic construct
  misc_feature 1..22: note = Synthetic construct
  source 1..22: mol_type = other DNA
tgggaaccggcgttagccactc

SEQ ID NO: 7644 - DNA, 22 bp, synthetic construct
  misc_feature 1..22: note = Synthetic construct
  source 1..22: mol_type = other DNA
gggaaccggcgttagccactcc

SEQ ID NO: 7645 - DNA, 22 bp, synthetic construct
  misc_feature 1..22: note = Synthetic construct
  source 1..22: mol_type = other DNA
ggaaccggcgttagccactccg

SEQ ID NO: 7646 - DNA, 22 bp, synthetic construct
  misc_feature 1..22: note = Synthetic construct
  source 1..22: mol_type = other DNA
gaaccggcgttagccactccga

SEQ ID NO: 7647 - DNA, 22 bp, synthetic construct
  misc_feature 1..22: note = Synthetic construct
  source 1..22: mol_type = other DNA
aaccggcgttagccactccgaa

SEQ ID NO: 7648 - DNA, 22 bp, synthetic construct
  misc_feature 1..22: note = Synthetic construct
  source 1..22: mol_type = other DNA
accggcgttagccactccgaag

SEQ ID NO: 7649 - DNA, 22 bp, synthetic construct
  misc_feature 1..22: note = Synthetic construct
  source 1..22: mol_type = other DNA
ccggcgttagccactccgaagt

SEQ ID NO: 7650 - DNA, 22 bp, synthetic construct
  misc_feature 1..22: note = Synthetic construct
  source 1..22: mol_type = other DNA
cggcgttagccactccgaagtg

SEQ ID NO: 7651 - DNA, 22 bp, synthetic construct
  misc_feature 1..22: note = Synthetic construct
  source 1..22: mol_type = other DNA
ggcgttagccactccgaagtgc

SEQ ID NO: 7652 - DNA, 22 bp, synthetic construct
  misc_feature 1..22: note = Synthetic construct
  source 1..22: mol_type = other DNA
gcgttagccactccgaagtgcg

SEQ ID NO: 7653 - DNA, 22 bp, synthetic construct
  misc_feature 1..22: note = Synthetic construct
  source 1..22: mol_type = other DNA
cgttagccactccgaagtgcgt

SEQ ID NO: 7654 - DNA, 22 bp, synthetic construct
  misc_feature 1..22: note = Synthetic construct
  source 1..22: mol_type = other DNA
gttagccactccgaagtgcgta

SEQ ID NO: 7655 - DNA, 22 bp, synthetic construct
  misc_feature 1..22: note = Synthetic construct
  source 1..22: mol_type = other DNA
ttagccactccgaagtgcgtat

SEQ ID NO: 7656 - DNA, 22 bp, synthetic construct
  misc_feature 1..22: note = Synthetic construct
  source 1..22: mol_type = other DNA
tagccactccgaagtgcgtata

SEQ ID NO: 7657 - DNA, 22 bp, synthetic construct
  misc_feature 1..22: note = Synthetic construct
  source 1..22: mol_type = other DNA
agccactccgaagtgcgtataa

SEQ ID NO: 7658 - DNA, 22 bp, synthetic construct
  misc_feature 1..22: note = Synthetic construct
  source 1..22: mol_type = other DNA
gccactccgaagtgcgtataac

SEQ ID NO: 7659 - DNA, 22 bp, synthetic construct
  misc_feature 1..22: note = Synthetic construct
  source 1..22: mol_type = other DNA
ccactccgaagtgcgtataacg

SEQ ID NO: 7660 - DNA, 22 bp, synthetic construct
  misc_feature 1..22: note = Synthetic construct
  source 1..22: mol_type = other DNA
cactccgaagtgcgtataacgc

SEQ ID NO: 7661 - DNA, 22 bp, synthetic construct
  misc_feature 1..22: note = Synthetic construct
  source 1..22: mol_type = other DNA
actccgaagtgcgtataacgcg

SEQ ID NO: 7662 - DNA, 22 bp, synthetic construct
  misc_feature 1..22: note = Synthetic construct
  source 1..22: mol_type = other DNA
ctccgaagtgcgtataacgcgc

SEQ ID NO: 7663 - DNA, 22 bp, synthetic construct
  misc_feature 1..22: note = Synthetic construct
  source 1..22: mol_type = other DNA
tccgaagtgcgtataacgcgca

SEQ ID NO: 7664 - DNA, 22 bp, synthetic construct
  misc_feature 1..22: note = Synthetic construct
  source 1..22: mol_type = other DNA
ccgaagtgcgtataacgcgcac

SEQ ID NO: 7665 - DNA, 22 bp, synthetic construct
  misc_feature 1..22: note = Synthetic construct
  source 1..22: mol_type = other DNA
cgaagtgcgtataacgcgcacg

SEQ ID NO: 7666 - DNA, 22 bp, synthetic construct
  misc_feature 1..22: note = Synthetic construct
  source 1..22: mol_type = other DNA
gaagtgcgtataacgcgcacgc

SEQ ID NO: 7667 - DNA, 22 bp, synthetic construct
  misc_feature 1..22: note = Synthetic construct
  source 1..22: mol_type = other DNA
aagtgcgtataacgcgcacgcc

SEQ ID NO: 7668 - DNA, 22 bp, synthetic construct
  misc_feature 1..22: note = Synthetic construct
  source 1..22: mol_type = other DNA
agtgcgtataacgcgcacgccg

SEQ ID NO: 7669 - DNA, 22 bp, synthetic construct
  misc_feature 1..22: note = Synthetic construct
  source 1..22: mol_type = other DNA
gtgcgtataacgcgcacgccgg

SEQ ID NO: 7670 - DNA, 22 bp, synthetic construct
  misc_feature 1..22: note = Synthetic construct
  source 1..22: mol_type = other DNA
tgcgtataacgcgcacgccggc

SEQ ID NO: 7671 - DNA, 22 bp, synthetic construct
  misc_feature 1..22: note = Synthetic construct
  source 1..22: mol_type = other DNA
gcgtataacgcgcacgccggcg

SEQ ID NO: 7672 - DNA, 22 bp, synthetic construct
  misc_feature 1..22: note = Synthetic construct
  source 1..22: mol_type = other DNA
cgtataacgcgcacgccggcgg

SEQ ID NO: 7673 - DNA, 22 bp, synthetic construct
  misc_feature 1..22: note = Synthetic construct
  source 1..22: mol_type = other DNA
gtataacgcgcacgccggcgga

SEQ ID NO: 7674 - DNA, 22 bp, synthetic construct
  misc_feature 1..22: note = Synthetic construct
  source 1..22: mol_type = other DNA
tataacgcgcacgccggcggac

SEQ ID NO: 7675 - DNA, 22 bp, synthetic construct
  misc_feature 1..22: note = Synthetic construct
  source 1..22: mol_type = other DNA
ataacgcgcacgccggcggact

SEQ ID NO: 7676 - DNA, 22 bp, synthetic construct
  misc_feature 1..22: note = Synthetic construct
  source 1..22: mol_type = other DNA
taacgcgcacgccggcggactt

SEQ ID NO: 7677 - DNA, 22 bp, synthetic construct
  misc_feature 1..22: note = Synthetic construct
  source 1..22: mol_type = other DNA
aacgcgcacgccggcggacttc

SEQ ID NO: 7678 - DNA, 22 bp, synthetic construct
  misc_feature 1..22: note = Synthetic construct
  source 1..22: mol_type = other DNA
acgcgcacgccggcggacttca

SEQ ID NO: 7679 - DNA, 22 bp, synthetic construct
  misc_feature 1..22: note = Synthetic construct
  source 1..22: mol_type = other DNA
cgcgcacgccggcggacttcat

SEQ ID NO: 7680 - DNA, 22 bp, synthetic construct
  misc_feature 1..22: note = Synthetic construct
  source 1..22: mol_type = other DNA
gcgcacgccggcggacttcatg

SEQ ID NO: 7681 - DNA, 22 bp, synthetic construct
  misc_feature 1..22: note = Synthetic construct
  source 1..22: mol_type = other DNA
cgcacgccggcggacttcatgc

SEQ ID NO: 7682 - DNA, 22 bp, synthetic construct
  misc_feature 1..22: note = Synthetic construct
  source 1..22: mol_type = other DNA
gcacgccggcggacttcatgct

SEQ ID NO: 7683 - DNA, 22 bp, synthetic construct
  misc_feature 1..22: note = Synthetic construct
  source 1..22: mol_type = other DNA
cacgccggcggacttcatgctg

SEQ ID NO: 7684 - DNA, 22 bp, synthetic construct
  misc_feature 1..22: note = Synthetic construct
  source 1..22: mol_type = other DNA
acgccggcggacttcatgctgt

SEQ ID NO: 7685 - DNA, 22 bp, synthetic construct
  misc_feature 1..22: note = Synthetic construct
  source 1..22: mol_type = other DNA
cgccggcggacttcatgctgtc

SEQ ID NO: 7686 - DNA, 22 bp, synthetic construct
  misc_feature 1..22: note = Synthetic construct
  source 1..22: mol_type = other DNA
gccggcggacttcatgctgtcg

SEQ ID NO: 7687 - DNA, 22 bp, synthetic construct
  misc_feature 1..22: note = Synthetic construct
  source 1..22: mol_type = other DNA
ccggcggacttcatgctgtcgg

SEQ ID NO: 7688 - DNA, 22 bp, synthetic construct
  misc_feature 1..22: note = Synthetic construct
  source 1..22: mol_type = other DNA
cggcggacttcatgctgtcggt

SEQ ID NO: 7689 - DNA, 22 bp, synthetic construct
  misc_feature 1..22: note = Synthetic construct
  source 1..22: mol_type = other DNA
ggcggacttcatgctgtcggtg

SEQ ID NO: 7690 - DNA, 22 bp, synthetic construct
  misc_feature 1..22: note = Synthetic construct
  source 1..22: mol_type = other DNA
gcggacttcatgctgtcggtga

SEQ ID NO: 7691 - DNA, 22 bp, synthetic construct
  misc_feature 1..22: note = Synthetic construct
  source 1..22: mol_type = other DNA
cggacttcatgctgtcggtgat

SEQ ID NO: 7692 - DNA, 22 bp, synthetic construct
  misc_feature 1..22: note = Synthetic construct
  source 1..22: mol_type = other DNA
ggacttcatgctgtcggtgatt

SEQ ID NO: 7693 - DNA, 22 bp, synthetic construct
  misc_feature 1..22: note = Synthetic construct
  source 1..22: mol_type = other DNA
gacttcatgctgtcggtgattt

SEQ ID NO: 7694 - DNA, 22 bp, synthetic construct
  misc_feature 1..22: note = Synthetic construct
  source 1..22: mol_type = other DNA
acttcatgctgtcggtgatttc

SEQ ID NO: 7695 - DNA, 22 bp, synthetic construct
  misc_feature 1..22: note = Synthetic construct
  source 1..22: mol_type = other DNA
cttcatgctgtcggtgatttca

SEQ ID NO: 7696 - DNA, 22 bp, synthetic construct
  misc_feature 1..22: note = Synthetic construct
  source 1..22: mol_type = other DNA
ttcatgctgtcggtgatttcac

SEQ ID NO: 7697 - DNA, 22 bp, synthetic construct
  misc_feature 1..22: note = Synthetic construct
  source 1..22: mol_type = other DNA
tcatgctgtcggtgatttcacc

SEQ ID NO: 7698 - DNA, 22 bp, synthetic construct
  misc_feature 1..22: note = Synthetic construct
  source 1..22: mol_type = other DNA
catgctgtcggtgatttcacct

SEQ ID NO: 7699 - DNA, 22 bp, synthetic construct
  misc_feature 1..22: note = Synthetic construct
  source 1..22: mol_type = other DNA
atgctgtcggtgatttcacctc

SEQ ID NO: 7700 - DNA, 22 bp, synthetic construct
  misc_feature 1..22: note = Synthetic construct
  source 1..22: mol_type = other DNA
tgctgtcggtgatttcacctcc

SEQ ID NO: 7701 - DNA, 22 bp, synthetic construct
  misc_feature 1..22: note = Synthetic construct
  source 1..22: mol_type = other DNA
gctgtcggtgatttcacctcca

SEQ ID NO: 7702 - DNA, 22 bp, synthetic construct
  misc_feature 1..22: note = Synthetic construct
  source 1..22: mol_type = other DNA
ctgtcggtgatttcacctccag

SEQ ID NO: 7703 - DNA, 22 bp, synthetic construct
  misc_feature 1..22: note = Synthetic construct
  source 1..22: mol_type = other DNA
tgtcggtgatttcacctccagt

SEQ ID NO: 7704 - DNA, 22 bp, synthetic construct
  misc_feature 1..22: note = Synthetic construct
  source 1..22: mol_type = other DNA
gtcggtgatttcacctccagta

SEQ ID NO: 7705 - DNA, 22 bp, synthetic construct
  misc_feature 1..22: note = Synthetic construct
  source 1..22: mol_type = other DNA
tcggtgatttcacctccagtat

SEQ ID NO: 7706 - DNA, 22 bp, synthetic construct
  misc_feature 1..22: note = Synthetic construct
  source 1..22: mol_type = other DNA
cggtgatttcacctccagtatg

SEQ ID NO: 7707 - DNA, 22 bp, synthetic construct
  misc_feature 1..22: note = Synthetic construct
  source 1..22: mol_type = other DNA
ggtgatttcacctccagtatgg

SEQ ID NO: 7708 - DNA, 22 bp, synthetic construct
  misc_feature 1..22: note = Synthetic construct
  source 1..22: mol_type = other DNA
gtgatttcacctccagtatgga

SEQ ID NO: 7709 - DNA, 22 bp, synthetic construct
  misc_feature 1..22: note = Synthetic construct
  source 1..22: mol_type = other DNA
tgatttcacctccagtatggaa

SEQ ID NO: 7710 - DNA, 22 bp, synthetic construct
  misc_feature 1..22: note = Synthetic construct
  source 1..22: mol_type = other DNA
gatttcacctccagtatggaac

SEQ ID NO: 7711 - DNA, 22 bp, synthetic construct
  misc_feature 1..22: note = Synthetic construct
  source 1..22: mol_type = other DNA
atttcacctccagtatggaacc

SEQ ID NO: 7712 - DNA, 22 bp, synthetic construct
  misc_feature 1..22: note = Synthetic construct
  source 1..22: mol_type = other DNA
tttcacctccagtatggaacca

SEQ ID NO: 7713 - DNA, 22 bp, synthetic construct
  misc_feature 1..22: note = Synthetic construct
  source 1..22: mol_type = other DNA
ttcacctccagtatggaaccac

SEQ ID NO: 7714 - DNA, 22 bp, synthetic construct
  misc_feature 1..22: note = Synthetic construct
  source 1..22: mol_type = other DNA
tcacctccagtatggaaccacg

SEQ ID NO: 7715 - DNA, 22 bp, synthetic construct
  misc_feature 1..22: note = Synthetic construct
  source 1..22: mol_type = other DNA
cacctccagtatggaaccacgc

SEQ ID NO: 7716 - DNA, 22 bp, synthetic construct
  misc_feature 1..22: note = Synthetic construct
  source 1..22: mol_type = other DNA
acctccagtatggaaccacgct

SEQ ID NO: 7717 - DNA, 22 bp, synthetic construct
  misc_feature 1..22: note = Synthetic construct
  source 1..22: mol_type = other DNA
cctccagtatggaaccacgcta

SEQ ID NO: 7718 - DNA, 22 bp, synthetic construct
  misc_feature 1..22: note = Synthetic construct
  source 1..22: mol_type = other DNA
ctccagtatggaaccacgctat

SEQ ID NO: 7719 - DNA, 22 bp, synthetic construct
  misc_feature 1..22: note = Synthetic construct
  source 1..22: mol_type = other DNA
tccagtatggaaccacgctatg

SEQ ID NO: 7720 - DNA, 22 bp, synthetic construct
  misc_feature 1..22: note = Synthetic construct
  source 1..22: mol_type = other DNA
ccagtatggaaccacgctatgt

SEQ ID NO: 7721 - DNA, 22 bp, synthetic construct
  misc_feature 1..22: note = Synthetic construct
  source 1..22: mol_type = other DNA
cagtatggaaccacgctatgta

SEQ ID NO: 7722 - DNA, 22 bp, synthetic construct
  misc_feature 1..22: note = Synthetic construct
  source 1..22: mol_type = other DNA
agtatggaaccacgctatgtag

SEQ ID NO: 7723 - DNA, 22 bp, synthetic construct
  misc_feature 1..22: note = Synthetic construct
  source 1..22: mol_type = other DNA
gtatggaaccacgctatgtagc

SEQ ID NO: 7724 - DNA, 22 bp, synthetic construct
  misc_feature 1..22: note = Synthetic construct
  source 1..22: mol_type = other DNA
tatggaaccacgctatgtagcg

SEQ ID NO: 7725 - DNA, 22 bp, synthetic construct
  misc_feature 1..22: note = Synthetic construct
  source 1..22: mol_type = other DNA
atggaaccacgctatgtagcga

SEQ ID NO: 7726 - DNA, 22 bp, synthetic construct
  misc_feature 1..22: note = Synthetic construct
  source 1..22: mol_type = other DNA
tggaaccacgctatgtagcgac

SEQ ID NO: 7727 - DNA, 22 bp, synthetic construct
  misc_feature 1..22: note = Synthetic construct
  source 1..22: mol_type = other DNA
ggaaccacgctatgtagcgacc

SEQ ID NO: 7728 - DNA, 22 bp, synthetic construct
  misc_feature 1..22: note = Synthetic construct
  source 1..22: mol_type = other DNA
gaaccacgctatgtagcgacca

SEQ ID NO: 7729 - DNA, 22 bp, synthetic construct
  misc_feature 1..22: note = Synthetic construct
  source 1..22: mol_type = other DNA
aaccacgctatgtagcgaccac

SEQ ID NO: 7730 - DNA, 22 bp, synthetic construct
  misc_feature 1..22: note = Synthetic construct
  source 1..22: mol_type = other DNA
accacgctatgtagcgaccact

SEQ ID NO: 7731 - DNA, 22 bp, synthetic construct
  misc_feature 1..22: note = Synthetic construct
  source 1..22: mol_type = other DNA
ccacgctatgtagcgaccactg

SEQ ID NO: 7732 - DNA, 22 bp, synthetic construct
  misc_feature 1..22: note = Synthetic construct
  source 1..22: mol_type = other DNA
cacgctatgtagcgaccactgt

SEQ ID NO: 7733 - DNA, 22 bp, synthetic construct
  misc_feature 1..22: note = Synthetic construct
  source 1..22: mol_type = other DNA
acgctatgtagcgaccactgtc

SEQ ID NO: 7734 - DNA, 22 bp, synthetic construct
  misc_feature 1..22: note = Synthetic construct
  source 1..22: mol_type = other DNA
cgctatgtagcgaccactgtcg

SEQ ID NO: 7735 - DNA, 22 bp, synthetic construct
  misc_feature 1..22: note = Synthetic construct
  source 1..22: mol_type = other DNA
gctatgtagcgaccactgtcgt

SEQ ID NO: 7736 - DNA, 22 bp, synthetic construct
  misc_feature 1..22: note = Synthetic construct
  source 1..22: mol_type = other DNA
ctatgtagcgaccactgtcgtg

SEQ ID NO: 7737 - DNA, 22 bp, synthetic construct
  misc_feature 1..22: note = Synthetic construct
  source 1..22: mol_type = other DNA
tatgtagcgaccactgtcgtgc

SEQ ID NO: 7738 - DNA, 22 bp, synthetic construct
  misc_feature 1..22: note = Synthetic construct
  source 1..22: mol_type = other DNA
atgtagcgaccactgtcgtgct

SEQ ID NO: 7739 - DNA, 22 bp, synthetic construct
  misc_feature 1..22: note = Synthetic construct
  source 1..22: mol_type = other DNA
tgtagcgaccactgtcgtgctt

SEQ ID NO: 7740 - DNA, 22 bp, synthetic construct
  misc_feature 1..22: note = Synthetic construct
  source 1..22: mol_type = other DNA
gtagcgaccactgtcgtgcttt

SEQ ID NO: 7741 - DNA, 22 bp, synthetic construct
  misc_feature 1..22: note = Synthetic construct
  source 1..22: mol_type = other DNA
tagcgaccactgtcgtgctttt

SEQ ID NO: 7742 - DNA, 22 bp, synthetic construct
  misc_feature 1..22: note = Synthetic construct
  source 1..22: mol_type = other DNA
agcgaccactgtcgtgcttttc

SEQ ID NO: 7743 - DNA, 22 bp, synthetic construct
  misc_feature 1..22: note = Synthetic construct
  source 1..22: mol_type = other DNA
gcgaccactgtcgtgcttttcg

SEQ ID NO: 7744 - DNA, 22 bp, synthetic construct
  misc_feature 1..22: note = Synthetic construct
  source 1..22: mol_type = other DNA
cgaccactgtcgtgcttttcgc

SEQ ID NO: 7745 - DNA, 22 bp, synthetic construct
  misc_feature 1..22: note = Synthetic construct
  source 1..22: mol_type = other DNA
gaccactgtcgtgcttttcgct

SEQ ID NO: 7746 - DNA, 22 bp, synthetic construct
  misc_feature 1..22: note = Synthetic construct
  source 1..22: mol_type = other DNA
accactgtcgtgcttttcgctg

SEQ ID NO: 7747 - DNA, 22 bp, synthetic construct
  misc_feature 1..22: note = Synthetic construct
  source 1..22: mol_type = other DNA
ccactgtcgtgcttttcgctga

SEQ ID NO: 7748 - DNA, 22 bp, synthetic construct
  misc_feature 1..22: note = Synthetic construct
  source 1..22: mol_type = other DNA
cactgtcgtgcttttcgctgaa

SEQ ID NO: 7749 - DNA, 22 bp, synthetic construct
  misc_feature 1..22: note = Synthetic construct
  source 1..22: mol_type = other DNA
actgtcgtgcttttcgctgaag

SEQ ID NO: 7750 - DNA, 22 bp, synthetic construct
  misc_feature 1..22: note = Synthetic construct
  source 1..22: mol_type = other DNA
ctgtcgtgcttttcgctgaaga

SEQ ID NO: 7751 - DNA, 22 bp, synthetic construct
  misc_feature 1..22: note = Synthetic construct
  source 1..22: mol_type = other DNA
tgtcgtgcttttcgctgaagaa

SEQ ID NO: 7752 - DNA, 22 bp, synthetic construct
  misc_feature 1..22: note = Synthetic construct
  source 1..22: mol_type = other DNA
gtcgtgcttttcgctgaagaac

SEQ ID NO: 7753 - DNA, 22 bp, synthetic construct
  misc_feature 1..22: note = Synthetic construct
  source 1..22: mol_type = other DNA
tcgtgcttttcgctgaagaact

SEQ ID NO: 7754 - DNA, 22 bp, synthetic construct
  misc_feature 1..22: note = Synthetic construct
  source 1..22: mol_type = other DNA
cgtgcttttcgctgaagaactt

SEQ ID NO: 7755 - DNA, 22 bp, synthetic construct
  misc_feature 1..22: note = Synthetic construct
  source 1..22: mol_type = other DNA
gtgcttttcgctgaagaacttg

SEQ ID NO: 7756 - DNA, 22 bp, synthetic construct
  misc_feature 1..22: note = Synthetic construct
  source 1..22: mol_type = other DNA
tgcttttcgctgaagaacttgc

SEQ ID NO: 7757 - DNA, 22 bp, synthetic construct
  misc_feature 1..22: note = Synthetic construct
  source 1..22: mol_type = other DNA
gcttttcgctgaagaacttgcg

SEQ ID NO: 7758 - DNA, 22 bp, synthetic construct
  misc_feature 1..22: note = Synthetic construct
  source 1..22: mol_type = other DNA
cttttcgctgaagaacttgcgt

SEQ ID NO: 7759 - DNA, 22 bp, synthetic construct
  misc_feature 1..22: note = Synthetic construct
  source 1..22: mol_type = other DNA
ttttcgctgaagaacttgcgtt

SEQ ID NO: 7760 - DNA, 22 bp, synthetic construct
  misc_feature 1..22: note = Synthetic construct
  source 1..22: mol_type = other DNA
tttcgctgaagaacttgcgttc

SEQ ID NO: 7761 - DNA, 22 bp, synthetic construct
  misc_feature 1..22: note = Synthetic construct
  source 1..22: mol_type = other DNA
ttcgctgaagaacttgcgttct

SEQ ID NO: 7762 - DNA, 22 bp, synthetic construct
  misc_feature 1..22: note = Synthetic construct
  source 1..22: mol_type = other DNA
tcgctgaagaacttgcgttctc

SEQ ID NO: 7763 - DNA, 22 bp, synthetic construct
  misc_feature 1..22: note = Synthetic construct
  source 1..22: mol_type = other DNA
cgctgaagaacttgcgttctcg

SEQ ID NO: 7764 - DNA, 22 bp, synthetic construct
  misc_feature 1..22: note = Synthetic construct
  source 1..22: mol_type = other DNA
gctgaagaacttgcgttctcga

SEQ ID NO: 7765 - DNA, 22 bp, synthetic construct
  misc_feature 1..22: note = Synthetic construct
  source 1..22: mol_type = other DNA
ctgaagaacttgcgttctcgag

SEQ ID NO: 7766 - DNA, 22 bp, synthetic construct
  misc_feature 1..22: note = Synthetic construct
  source 1..22: mol_type = other DNA
tgaagaacttgcgttctcgagc

SEQ ID NO: 7767 - DNA, 22 bp, synthetic construct
  misc_feature 1..22: note = Synthetic construct
  source 1..22: mol_type = other DNA
gaagaacttgcgttctcgagcg

SEQ ID NO: 7768 - DNA, 22 bp, synthetic construct
  misc_feature 1..22: note = Synthetic construct
  source 1..22: mol_type = other DNA
aagaacttgcgttctcgagcga

SEQ ID NO: 7769 - DNA, 22 bp, synthetic construct
  misc_feature 1..22: note = Synthetic construct
  source 1..22: mol_type = other DNA
agaacttgcgttctcgagcgat

SEQ ID NO: 7770 - DNA, 22 bp, synthetic construct
  misc_feature 1..22: note = Synthetic construct
  source 1..22: mol_type = other DNA
gaacttgcgttctcgagcgata

SEQ ID NO: 7771 - DNA, 22 bp, synthetic construct
  misc_feature 1..22: note = Synthetic construct
  source 1..22: mol_type = other DNA
aacttgcgttctcgagcgatac

SEQ ID NO: 7772 - DNA, 22 bp, synthetic construct
  misc_feature 1..22: note = Synthetic construct
  source 1..22: mol_type = other DNA
acttgcgttctcgagcgatacg

SEQ ID NO: 7773 - DNA, 22 bp, synthetic construct
  misc_feature 1..22: note = Synthetic construct
  source 1..22: mol_type = other DNA
cttgcgttctcgagcgatacga

SEQ ID NO: 7774 - DNA, 22 bp, synthetic construct
  misc_feature 1..22: note = Synthetic construct
  source 1..22: mol_type = other DNA
ttgcgttctcgagcgatacgag

SEQ ID NO: 7775 - DNA, 22 bp, synthetic construct
  misc_feature 1..22: note = Synthetic construct
  source 1..22: mol_type = other DNA
tgcgttctcgagcgatacgagc

SEQ ID NO: 7776 - DNA, 22 bp, synthetic construct
  misc_feature 1..22: note = Synthetic construct
  source 1..22: mol_type = other DNA
gcgttctcgagcgatacgagca

SEQ ID NO: 7777 - DNA, 22 bp, synthetic construct
  misc_feature 1..22: note = Synthetic construct
  source 1..22: mol_type = other DNA
cgttctcgagcgatacgagcaa

SEQ ID NO: 7778 - DNA, 22 bp, synthetic construct
  misc_feature 1..22: note = Synthetic construct
  source 1..22: mol_type = other DNA
gttctcgagcgatacgagcaag

SEQ ID NO: 7779 - DNA, 22 bp, synthetic construct
  misc_feature 1..22: note = Synthetic construct
  source 1..22: mol_type = other DNA
ttctcgagcgatacgagcaaga

SEQ ID NO: 7780 - DNA, 22 bp, synthetic construct
  misc_feature 1..22: note = Synthetic construct
  source 1..22: mol_type = other DNA
tctcgagcgatacgagcaagac

SEQ ID NO: 7781 - DNA, 22 bp, synthetic construct
  misc_feature 1..22: note = Synthetic construct
  source 1..22: mol_type = other DNA
ctcgagcgatacgagcaagacg

SEQ ID NO: 7782 - DNA, 22 bp, synthetic construct
  misc_feature 1..22: note = Synthetic construct
  source 1..22: mol_type = other DNA
tcgagcgatacgagcaagacgg

SEQ ID NO: 7783 - DNA, 22 bp, synthetic construct
  misc_feature 1..22: note = Synthetic construct
  source 1..22: mol_type = other DNA
cgagcgatacgagcaagacgga

SEQ ID NO: 7784 - DNA, 22 bp, synthetic construct
  misc_feature 1..22: note = Synthetic construct
  source 1..22: mol_type = other DNA
gagcgatacgagcaagacggaa

SEQ ID NO: 7785 - DNA, 22 bp, synthetic construct
  misc_feature 1..22: note = Synthetic construct
  source 1..22: mol_type = other DNA
agcgatacgagcaagacggaaa

SEQ ID NO: 7786 - DNA, 22 bp, synthetic construct
  misc_feature 1..22: note = Synthetic construct
  source 1..22: mol_type = other DNA
gcgatacgagcaagacggaaac

SEQ ID NO: 7787 - DNA, 22 bp, synthetic construct
  misc_feature 1..22: note = Synthetic construct
  source 1..22: mol_type = other DNA
cgatacgagcaagacggaaacc

SEQ ID NO: 7788 - DNA, 22 bp, synthetic construct
  misc_feature 1..22: note = Synthetic construct
  source 1..22: mol_type = other DNA
gatacgagcaagacggaaaccc

SEQ ID NO: 7789 - DNA, 22 bp, synthetic construct
  misc_feature 1..22: note = Synthetic construct
  source 1..22: mol_type = other DNA
atacgagcaagacggaaacccg

SEQ ID NO: 7790 - DNA, 22 bp, synthetic construct
  misc_feature 1..22: note = Synthetic construct
  source 1..22: mol_type = other DNA
tacgagcaagacggaaacccga

SEQ ID NO: 7791 - DNA, 22 bp, synthetic construct
  misc_feature 1..22: note = Synthetic construct
  source 1..22: mol_type = other DNA
acgagcaagacggaaacccgag

SEQ ID NO: 7792 - DNA, 22 bp, synthetic construct
  misc_feature 1..22: note = Synthetic construct
  source 1..22: mol_type = other DNA
cgagcaagacggaaacccgagg

SEQ ID NO: 7793 - DNA, 22 bp, synthetic construct
  misc_feature 1..22: note = Synthetic construct
  source 1..22: mol_type = other DNA
gagcaagacggaaacccgaggt

SEQ ID NO: 7794 - DNA, 22 bp, synthetic construct
  misc_feature 1..22: note = Synthetic construct
  source 1..22: mol_type = other DNA
agcaagacggaaacccgaggta

SEQ ID NO: 7795 - DNA, 22 bp, synthetic construct
  misc_feature 1..22: note = Synthetic construct
  source 1..22: mol_type = other DNA
gcaagacggaaacccgaggtac

SEQ ID NO: 7796 - DNA, 22 bp, synthetic construct
  misc_feature 1..22: note = Synthetic construct
  source 1..22: mol_type = other DNA
caagacggaaacccgaggtacg

SEQ ID NO: 7797 - DNA, 22 bp, synthetic construct
  misc_feature 1..22: note = Synthetic construct
  source 1..22: mol_type = other DNA
aagacggaaacccgaggtacgg

SEQ ID NO: 7798 - DNA, 22 bp, synthetic construct
  misc_feature 1..22: note = Synthetic construct
  source 1..22: mol_type = other DNA
agacggaaacccgaggtacggg

SEQ ID NO: 7799 - DNA, 22 bp, synthetic construct
  misc_feature 1..22: note = Synthetic construct
  source 1..22: mol_type = other DNA
gacggaaacccgaggtacgggt

SEQ ID NO: 7800 - DNA, 22 bp, synthetic construct
  misc_feature 1..22: note = Synthetic construct
  source 1..22: mol_type = other DNA
acggaaacccgaggtacgggta

SEQ ID NO: 7801 - DNA, 22 bp, synthetic construct
  misc_feature 1..22: note = Synthetic construct
  source 1..22: mol_type = other DNA
cggaaacccgaggtacgggtat

SEQ ID NO: 7802 - DNA, 22 bp, synthetic construct
  misc_feature 1..22: note = Synthetic construct
  source 1..22: mol_type = other DNA
ggaaacccgaggtacgggtatc

SEQ ID NO: 7803 - DNA, 22 bp, synthetic construct
  misc_feature 1..22: note = Synthetic construct
  source 1..22: mol_type = other DNA
gaaacccgaggtacgggtatcc

SEQ ID NO: 7804 - DNA, 22 bp, synthetic construct
  misc_feature 1..22: note = Synthetic construct
  source 1..22: mol_type = other DNA
aaacccgaggtacgggtatccg

SEQ ID NO: 7805 - DNA, 22 bp, synthetic construct
  misc_feature 1..22: note = Synthetic construct
  source 1..22: mol_type = other DNA
aacccgaggtacgggtatccgc

SEQ ID NO: 7806 - DNA, 22 bp, synthetic construct
  misc_feature 1..22: note = Synthetic construct
  source 1..22: mol_type = other DNA
acccgaggtacgggtatccgcg

SEQ ID NO: 7807 - DNA, 22 bp, synthetic construct
  misc_feature 1..22: note = Synthetic construct
  source 1..22: mol_type = other DNA
cccgaggtacgggtatccgcga

SEQ ID NO: 7808 - DNA, 22 bp, synthetic construct
  misc_feature 1..22: note = Synthetic construct
  source 1..22: mol_type = other DNA
ccgaggtacgggtatccgcgag

SEQ ID NO: 7809 - DNA, 22 bp, synthetic construct
  misc_feature 1..22: note = Synthetic construct
  source 1..22: mol_type = other DNA
cgaggtacgggtatccgcgagc

SEQ ID NO: 7810 - DNA, 22 bp, synthetic construct
  misc_feature 1..22: note = Synthetic construct
  source 1..22: mol_type = other DNA
gaggtacgggtatccgcgagca

SEQ ID NO: 7811 - DNA, 22 bp, synthetic construct
  misc_feature 1..22: note = Synthetic construct
  source 1..22: mol_type = other DNA
aggtacgggtatccgcgagcag

SEQ ID NO: 7812 - DNA, 22 bp, synthetic construct
  misc_feature 1..22: note = Synthetic construct
  source 1..22: mol_type = other DNA
ggtacgggtatccgcgagcagc

SEQ ID NO: 7813 - DNA, 22 bp, synthetic construct
  misc_feature 1..22: note = Synthetic construct
  source 1..22: mol_type = other DNA
gtacgggtatccgcgagcagcc

SEQ ID NO: 7814 - DNA, 22 bp, synthetic construct
  misc_feature 1..22: note = Synthetic construct
  source 1..22: mol_type = other DNA
tacgggtatccgcgagcagccg

SEQ ID NO: 7815 - DNA, 22 bp, synthetic construct
  misc_feature 1..22: note = Synthetic construct
  source 1..22: mol_type = other DNA
acgggtatccgcgagcagccgc

SEQ ID NO: 7816 - DNA, 22 bp, synthetic construct
  misc_feature 1..22: note = Synthetic construct
  source 1..22: mol_type = other DNA
cgggtatccgcgagcagccgcc

SEQ ID NO: 7817 - DNA, 22 bp, synthetic construct
  misc_feature 1..22: note = Synthetic construct
  source 1..22: mol_type = other DNA
gggtatccgcgagcagccgccc

SEQ ID NO: 7818 - DNA, 22 bp, synthetic construct
  misc_feature 1..22: note = Synthetic construct
  source 1..22: mol_type = other DNA
ggtatccgcgagcagccgcccg

SEQ ID NO: 7819 - DNA, 22 bp, synthetic construct
  misc_feature 1..22: note = Synthetic construct
  source 1..22: mol_type = other DNA
gtatccgcgagcagccgcccgt

SEQ ID NO: 7820 - DNA, 22 bp, synthetic construct
  misc_feature 1..22: note = Synthetic construct
  source 1..22: mol_type = other DNA
tatccgcgagcagccgcccgta

SEQ ID NO: 7821 - DNA, 22 bp, synthetic construct
  misc_feature 1..22: note = Synthetic construct
  source 1..22: mol_type = other DNA
atccgcgagcagccgcccgtac

SEQ ID NO: 7822 - DNA, 22 bp, synthetic construct
  misc_feature 1..22: note = Synthetic construct
  source 1..22: mol_type = other DNA
tccgcgagcagccgcccgtacg

SEQ ID NO: 7823 - DNA, 22 bp, synthetic construct
  misc_feature 1..22: note = Synthetic construct
  source 1..22: mol_type = other DNA
ccgcgagcagccgcccgtacgg

SEQ ID NO: 7824 - DNA, 22 bp, synthetic construct
  misc_feature 1..22: note = Synthetic construct
  source 1..22: mol_type = other DNA
cgcgagcagccgcccgtacgga

SEQ ID NO: 7825 - DNA, 22 bp, synthetic construct
  misc_feature 1..22: note = Synthetic construct
  source 1..22: mol_type = other DNA
gcgagcagccgcccgtacggag

SEQ ID NO: 7826 - DNA, 22 bp, synthetic construct
  misc_feature 1..22: note = Synthetic construct
  source 1..22: mol_type = other DNA
cgagcagccgcccgtacggagt

SEQ ID NO: 7827 - DNA, 22 bp, synthetic construct
  misc_feature 1..22: note = Synthetic construct
  source 1..22: mol_type = other DNA
gagcagccgcccgtacggagtc

SEQ ID NO: 7828 - DNA, 22 bp, synthetic construct
  misc_feature 1..22: note = Synthetic construct
  source 1..22: mol_type = other DNA
agcagccgcccgtacggagtct

SEQ ID NO: 7829 - DNA, 22 bp, synthetic construct
  misc_feature 1..22: note = Synthetic construct
  source 1..22: mol_type = other DNA
gcagccgcccgtacggagtctt

SEQ ID NO: 7830 - DNA, 22 bp, synthetic construct
  misc_feature 1..22: note = Synthetic construct
  source 1..22: mol_type = other DNA
cagccgcccgtacggagtcttg

SEQ ID NO: 7831 - DNA, 22 bp, synthetic construct
  misc_feature 1..22: note = Synthetic construct
  source 1..22: mol_type = other DNA
agccgcccgtacggagtcttgg

SEQ ID NO: 7832 - DNA, 22 bp, synthetic construct
  misc_feature 1..22: note = Synthetic construct
  source 1..22: mol_type = other DNA
gccgcccgtacggagtcttggt

SEQ ID NO: 7833 - DNA, 22 bp, synthetic construct
  misc_feature 1..22: note = Synthetic construct
  source 1..22: mol_type = other DNA
ccgcccgtacggagtcttggtg

SEQ ID NO: 7834 - DNA, 22 bp, synthetic construct
  misc_feature 1..22: note = Synthetic construct
  source 1..22: mol_type = other DNA
cgcccgtacggagtcttggtgt

SEQ ID NO: 7835 - DNA, 22 bp, synthetic construct
  misc_feature 1..22: note = Synthetic construct
  source 1..22: mol_type = other DNA
gcccgtacggagtcttggtgta

SEQ ID NO: 7836 - DNA, 22 bp, synthetic construct
  misc_feature 1..22: note = Synthetic construct
  source 1..22: mol_type = other DNA
cccgtacggagtcttggtgtat

SEQ ID NO: 7837 - DNA, 22 bp, synthetic construct
  misc_feature 1..22: note = Synthetic construct
  source 1..22: mol_type = other DNA
ccgtacggagtcttggtgtata

SEQ ID NO: 7838 - DNA, 22 bp, synthetic construct
  misc_feature 1..22: note = Synthetic construct
  source 1..22: mol_type = other DNA
cgtacggagtcttggtgtatac

SEQ ID NO: 7839 - DNA, 22 bp, synthetic construct
  misc_feature 1..22: note = Synthetic construct
  source 1..22: mol_type = other DNA
gtacggagtcttggtgtatacc

SEQ ID NO: 7840 - DNA, 22 bp, synthetic construct
  misc_feature 1..22: note = Synthetic construct
  source 1..22: mol_type = other DNA
tacggagtcttggtgtataccg

SEQ ID NO: 7841 - DNA, 22 bp, synthetic construct
  misc_feature 1..22: note = Synthetic construct
  source 1..22: mol_type = other DNA
acggagtcttggtgtataccga

SEQ ID NO: 7842 - DNA, 22 bp, synthetic construct
  misc_feature 1..22: note = Synthetic construct
  source 1..22: mol_type = other DNA
cggagtcttggtgtataccgag

SEQ ID NO: 7843 - DNA, 22 bp, synthetic construct
  misc_feature 1..22: note = Synthetic construct
  source 1..22: mol_type = other DNA
ggagtcttggtgtataccgaga

SEQ ID NO: 7844 - DNA, 22 bp, synthetic construct
  misc_feature 1..22: note = Synthetic construct
  source 1..22: mol_type = other DNA
gagtcttggtgtataccgagac

SEQ ID NO: 7845 - DNA, 22 bp, synthetic construct
  misc_feature 1..22: note = Synthetic construct
  source 1..22: mol_type = other DNA
agtcttggtgtataccgagact

SEQ ID NO: 7846 - DNA, 22 bp, synthetic construct
  misc_feature 1..22: note = Synthetic construct
  source 1..22: mol_type = other DNA
gtcttggtgtataccgagactg

SEQ ID NO: 7847 - DNA, 22 bp, synthetic construct
  misc_feature 1..22: note = Synthetic construct
  source 1..22: mol_type = other DNA
tcttggtgtataccgagactgc

SEQ ID NO: 7848 - DNA, 22 bp, synthetic construct
  misc_feature 1..22: note = Synthetic construct
  source 1..22: mol_type = other DNA
cttggtgtataccgagactgcc

SEQ ID NO: 7849 - DNA, 22 bp, synthetic construct
  misc_feature 1..22: note = Synthetic construct
  source 1..22: mol_type = other DNA
ttggtgtataccgagactgccg

SEQ ID NO: 7850 - DNA, 22 bp, synthetic construct
  misc_feature 1..22: note = Synthetic construct
  source 1..22: mol_type = other DNA
tggtgtataccgagactgccgt

SEQ ID NO: 7851 - DNA, 22 bp, synthetic construct
  misc_feature 1..22: note = Synthetic construct
  source 1..22: mol_type = other DNA
ggtgtataccgagactgccgta

SEQ ID NO: 7852 - DNA, 22 bp, synthetic construct
  misc_feature 1..22: note = Synthetic construct
  source 1..22: mol_type = other DNA
gtgtataccgagactgccgtag

SEQ ID NO: 7853 - DNA, 22 bp, synthetic construct
  misc_feature 1..22: note = Synthetic construct
  source 1..22: mol_type = other DNA
tgtataccgagactgccgtagg

SEQ ID NO: 7854 - DNA, 22 bp, synthetic construct
  misc_feature 1..22: note = Synthetic construct
  source 1..22: mol_type = other DNA
gtataccgagactgccgtaggc

SEQ ID NO: 7855 - DNA, 22 bp, synthetic construct
  misc_feature 1..22: note = Synthetic construct
  source 1..22: mol_type = other DNA
tataccgagactgccgtaggcg

SEQ ID NO: 7856 - DNA, 22 bp, synthetic construct
  misc_feature 1..22: note = Synthetic construct
  source 1..22: mol_type = other DNA
ataccgagactgccgtaggcgg

SEQ ID NO: 7857 - DNA, 22 bp, synthetic construct
  misc_feature 1..22: note = Synthetic construct
  source 1..22: mol_type = other DNA
taccgagactgccgtaggcggg

SEQ ID NO: 7858 - DNA, 22 bp, synthetic construct
  misc_feature 1..22: note = Synthetic construct
  source 1..22: mol_type = other DNA
accgagactgccgtaggcgggc

SEQ ID NO: 7859 - DNA, 22 bp, synthetic construct
  misc_feature 1..22: note = Synthetic construct
  source 1..22: mol_type = other DNA
ccgagactgccgtaggcgggct

SEQ ID NO: 7860 - DNA, 22 bp, synthetic construct
  misc_feature 1..22: note = Synthetic construct
  source 1..22: mol_type = other DNA
cgagactgccgtaggcgggctg

SEQ ID NO: 7861 - DNA, 22 bp, synthetic construct
  misc_feature 1..22: note = Synthetic construct
  source 1..22: mol_type = other DNA
gagactgccgtaggcgggctga

SEQ ID NO: 7862 - DNA, 22 bp, synthetic construct
  misc_feature 1..22: note = Synthetic construct
  source 1..22: mol_type = other DNA
agactgccgtaggcgggctgac

SEQ ID NO: 7863 - DNA, 22 bp, synthetic construct
  misc_feature 1..22: note = Synthetic construct
  source 1..22: mol_type = other DNA
gactgccgtaggcgggctgact

SEQ ID NO: 7864 - DNA, 22 bp, synthetic construct
  misc_feature 1..22: note = Synthetic construct
  source 1..22: mol_type = other DNA
actgccgtaggcgggctgacta

SEQ ID NO: 7865 - DNA, 22 bp, synthetic construct
  misc_feature 1..22: note = Synthetic construct
  source 1..22: mol_type = other DNA
ctgccgtaggcgggctgactac

SEQ ID NO: 7866 - DNA, 22 bp, synthetic construct
  misc_feature 1..22: note = Synthetic construct
  source 1..22: mol_type = other DNA
tgccgtaggcgggctgactacg

SEQ ID NO: 7867 - DNA, 22 bp, synthetic construct
  misc_feature 1..22: note = Synthetic construct
  source 1..22: mol_type = other DNA
gccgtaggcgggctgactacgt

SEQ ID NO: 7868 - DNA, 22 bp, synthetic construct
  misc_feature 1..22: note = Synthetic construct
  source 1..22: mol_type = other DNA
ccgtaggcgggctgactacgta

SEQ ID NO: 7869 - DNA, 22 bp, synthetic construct
  misc_feature 1..22: note = Synthetic construct
  source 1..22: mol_type = other DNA
cgtaggcgggctgactacgtag

SEQ ID NO: 7870 - DNA, 22 bp, synthetic construct
  misc_feature 1..22: note = Synthetic construct
  source 1..22: mol_type = other DNA
gtaggcgggctgactacgtagt

SEQ ID NO: 7871 - DNA, 22 bp, synthetic construct
  misc_feature 1..22: note = Synthetic construct
  source 1..22: mol_type = other DNA
taggcgggctgactacgtagta

SEQ ID NO: 7872 - DNA, 22 bp, synthetic construct
  misc_feature 1..22: note = Synthetic construct
  source 1..22: mol_type = other DNA
aggcgggctgactacgtagtag

SEQ ID NO: 7873 - DNA, 22 bp, synthetic construct
  misc_feature 1..22: note = Synthetic construct
  source 1..22: mol_type = other DNA
ggcgggctgactacgtagtagt

SEQ ID NO: 7874 - DNA, 22 bp, synthetic construct
  misc_feature 1..22: note = Synthetic construct
  source 1..22: mol_type = other DNA
gcgggctgactacgtagtagtc

SEQ ID NO: 7875 - DNA, 22 bp, synthetic construct
  misc_feature 1..22: note = Synthetic construct
  source 1..22: mol_type = other DNA
cgggctgactacgtagtagtcg

SEQ ID NO: 7876 - DNA, 22 bp, synthetic construct
  misc_feature 1..22: note = Synthetic construct
  source 1..22: mol_type = other DNA
gggctgactacgtagtagtcgg

SEQ ID NO: 7877 - DNA, 22 bp, synthetic construct
  misc_feature 1..22: note = Synthetic construct
  source 1..22: mol_type = other DNA
ggctgactacgtagtagtcggc

SEQ ID NO: 7878 - DNA, 22 bp, synthetic construct
  misc_feature 1..22: note = Synthetic construct
  source 1..22: mol_type = other DNA
gctgactacgtagtagtcggca

SEQ ID NO: 7879 - DNA, 22 bp, synthetic construct
  misc_feature 1..22: note = Synthetic construct
  source 1..22: mol_type = other DNA
ctgactacgtagtagtcggcag

SEQ ID NO: 7880 - DNA, 22 bp, synthetic construct
  misc_feature 1..22: note = Synthetic construct
  source 1..22: mol_type = other DNA
tgactacgtagtagtcggcagc

SEQ ID NO: 7881 - DNA, 22 bp, synthetic construct
  misc_feature 1..22: note = Synthetic construct
  source 1..22: mol_type = other DNA
gactacgtagtagtcggcagcg

SEQ ID NO: 7882 - DNA, 22 bp, synthetic construct
  misc_feature 1..22: note = Synthetic construct
  source 1..22: mol_type = other DNA
actacgtagtagtcggcagcga

SEQ ID NO: 7883 - DNA, 22 bp, synthetic construct
  misc_feature 1..22: note = Synthetic construct
  source 1..22: mol_type = other DNA
ctacgtagtagtcggcagcgag

SEQ ID NO: 7884 - DNA, 22 bp, synthetic construct
  misc_feature 1..22: note = Synthetic construct
  source 1..22: mol_type = other DNA
tacgtagtagtcggcagcgagg

SEQ ID NO: 7885 - DNA, 22 bp, synthetic construct
  misc_feature 1..22: note = Synthetic construct
  source 1..22: mol_type = other DNA
acgtagtagtcggcagcgaggt

SEQ ID NO: 7886 - DNA, 22 bp, synthetic construct
  misc_feature 1..22: note = Synthetic construct
  source 1..22: mol_type = other DNA
cgtagtagtcggcagcgaggtc

SEQ ID NO: 7887 - DNA, 22 bp, synthetic construct
  misc_feature 1..22: note = Synthetic construct
  source 1..22: mol_type = other DNA
gtagtagtcggcagcgaggtcc

SEQ ID NO: 7888 - DNA, 22 bp, synthetic construct
  misc_feature 1..22: note = Synthetic construct
  source 1..22: mol_type = other DNA
tagtagtcggcagcgaggtccg

SEQ ID NO: 7889 - DNA, 22 bp, synthetic construct
  misc_feature 1..22: note = Synthetic construct
  source 1..22: mol_type = other DNA
agtagtcggcagcgaggtccgt

SEQ ID NO: 7890 - DNA, 22 bp, synthetic construct
  misc_feature 1..22: note = Synthetic construct
  source 1..22: mol_type = other DNA
gtagtcggcagcgaggtccgtc

SEQ ID NO: 7891 - DNA, 22 bp, synthetic construct
  misc_feature 1..22: note = Synthetic construct
  source 1..22: mol_type = other DNA
tagtcggcagcgaggtccgtcc

SEQ ID NO: 7892 - DNA, 22 bp, synthetic construct
  misc_feature 1..22: note = Synthetic construct
  source 1..22: mol_type = other DNA
agtcggcagcgaggtccgtccc

SEQ ID NO: 7893 - DNA, 22 bp, synthetic construct
  misc_feature 1..22: note = Synthetic construct
  source 1..22: mol_type = other DNA
gtcggcagcgaggtccgtccca

SEQ ID NO: 7894 - DNA, 22 bp, synthetic construct
  misc_feature 1..22: note = Synthetic construct
  source 1..22: mol_type = other DNA
tcggcagcgaggtccgtcccac

SEQ ID NO: 7895 - DNA, 22 bp, synthetic construct
  misc_feature 1..22: note = Synthetic construct
  source 1..22: mol_type = other DNA
cggcagcgaggtccgtcccacc

SEQ ID NO: 7896 - DNA, 22 bp, synthetic construct
  misc_feature 1..22: note = Synthetic construct
  source 1..22: mol_type = other DNA
ggcagcgaggtccgtcccaccg

SEQ ID NO: 7897 - DNA, 22 bp, synthetic construct
  misc_feature 1..22: note = Synthetic construct
  source 1..22: mol_type = other DNA
gcagcgaggtccgtcccaccga

SEQ ID NO: 7898 - DNA, 22 bp, synthetic construct
  misc_feature 1..22: note = Synthetic construct
  source 1..22: mol_type = other DNA
cagcgaggtccgtcccaccgaa

SEQ ID NO: 7899 - DNA, 22 bp, synthetic construct
  misc_feature 1..22: note = Synthetic construct
  source 1..22: mol_type = other DNA
agcgaggtccgtcccaccgaag

SEQ ID NO: 7900 - DNA, 22 bp, synthetic construct
  misc_feature 1..22: note = Synthetic construct
  source 1..22: mol_type = other DNA
gcgaggtccgtcccaccgaaga

SEQ ID NO: 7901 - DNA, 22 bp, synthetic construct
  misc_feature 1..22: note = Synthetic construct
  source 1..22: mol_type = other DNA
cgaggtccgtcccaccgaagaa

SEQ ID NO: 7902 - DNA, 22 bp, synthetic construct
  misc_feature 1..22: note = Synthetic construct
  source 1..22: mol_type = other DNA
gaggtccgtcccaccgaagaac

SEQ ID NO: 7903 - DNA, 22 bp, synthetic construct
  misc_feature 1..22: note = Synthetic construct
  source 1..22: mol_type = other DNA
aggtccgtcccaccgaagaaca

SEQ ID NO: 7904 - DNA, 22 bp, synthetic construct
  misc_feature 1..22: note = Synthetic construct
  source 1..22: mol_type = other DNA
ggtccgtcccaccgaagaacat

SEQ ID NO: 7905 - DNA, 22 bp, synthetic construct
  misc_feature 1..22: note = Synthetic construct
  source 1..22: mol_type = other DNA
gtccgtcccaccgaagaacatc

SEQ ID NO: 7906 - DNA, 22 bp, synthetic construct
  misc_feature 1..22: note = Synthetic construct
  source 1..22: mol_type = other DNA
tccgtcccaccgaagaacatcg

SEQ ID NO: 7907 - DNA, 22 bp, synthetic construct
  misc_feature 1..22: note = Synthetic construct
  source 1..22: mol_type = other DNA
ccgtcccaccgaagaacatcga

SEQ ID NO: 7908 - DNA, 22 bp, synthetic construct
  misc_feature 1..22: note = Synthetic construct
  source 1..22: mol_type = other DNA
cgtcccaccgaagaacatcgaa

SEQ ID NO: 7909 - DNA, 22 bp, synthetic construct
  misc_feature 1..22: note = Synthetic construct
  source 1..22: mol_type = other DNA
gtcccaccgaagaacatcgaag

SEQ ID NO: 7910 - DNA, 22 bp, synthetic construct
  misc_feature 1..22: note = Synthetic construct
  source 1..22: mol_type = other DNA
tcccaccgaagaacatcgaagg

SEQ ID NO: 7911 - DNA, 22 bp, synthetic construct
  misc_feature 1..22: note = Synthetic construct
  source 1..22: mol_type = other DNA
cccaccgaagaacatcgaaggc

SEQ ID NO: 7912 - DNA, 22 bp, synthetic construct
  misc_feature 1..22: note = Synthetic construct
  source 1..22: mol_type = other DNA
ccaccgaagaacatcgaaggca

SEQ ID NO: 7913 - DNA, 22 bp, synthetic construct
  misc_feature 1..22: note = Synthetic construct
  source 1..22: mol_type = other DNA
caccgaagaacatcgaaggcac

SEQ ID NO: 7914 - DNA, 22 bp, synthetic construct
  misc_feature 1..22: note = Synthetic construct
  source 1..22: mol_type = other DNA
accgaagaacatcgaaggcacc

SEQ ID NO: 7915 - DNA, 22 bp, synthetic construct
  misc_feature 1..22: note = Synthetic construct
  source 1..22: mol_type = other DNA
ccgaagaacatcgaaggcacct

SEQ ID NO: 7916 - DNA, 22 bp, synthetic construct
  misc_feature 1..22: note = Synthetic construct
  source 1..22: mol_type = other DNA
cgaagaacatcgaaggcacctg

SEQ ID NO: 7917 - DNA, 22 bp, synthetic construct
  misc_feature 1..22: note = Synthetic construct
  source 1..22: mol_type = other DNA
gaagaacatcgaaggcacctgg

SEQ ID NO: 7918 - DNA, 22 bp, synthetic construct
  misc_feature 1..22: note = Synthetic construct
  source 1..22: mol_type = other DNA
aagaacatcgaaggcacctggg

SEQ ID NO: 7919 - DNA, 22 bp, synthetic construct
  misc_feature 1..22: note = Synthetic construct
  source 1..22: mol_type = other DNA
agaacatcgaaggcacctggga

SEQ ID NO: 7920 - DNA, 22 bp, synthetic construct
  misc_feature 1..22: note = Synthetic construct
  source 1..22: mol_type = other DNA
gaacatcgaaggcacctgggag

SEQ ID NO: 7921 - DNA, 22 bp, synthetic construct
  misc_feature 1..22: note = Synthetic construct
  source 1..22: mol_type = other DNA
aacatcgaaggcacctgggagg

SEQ ID NO: 7922 - DNA, 22 bp, synthetic construct
  misc_feature 1..22: note = Synthetic construct
  source 1..22: mol_type = other DNA
acatcgaaggcacctgggagga

SEQ ID NO: 7923 - DNA, 22 bp, synthetic construct
  misc_feature 1..22: note = Synthetic construct
  source 1..22: mol_type = other DNA
catcgaaggcacctgggaggag

SEQ ID NO: 7924 - DNA, 22 bp, synthetic construct
  misc_feature 1..22: note = Synthetic construct
  source 1..22: mol_type = other DNA
atcgaaggcacctgggaggaga

SEQ ID NO: 7925 - DNA, 22 bp, synthetic construct
  misc_feature 1..22: note = Synthetic construct
  source 1..22: mol_type = other DNA
tcgaaggcacctgggaggagag

SEQ ID NO: 7926 - DNA, 22 bp, synthetic construct
  misc_feature 1..22: note = Synthetic construct
  source 1..22: mol_type = other DNA
cgaaggcacctgggaggagagc

SEQ ID NO: 7927 - DNA, 22 bp, synthetic construct
  misc_feature 1..22: note = Synthetic construct
  source 1..22: mol_type = other DNA
gaaggcacctgggaggagagcc

SEQ ID NO: 7928 - DNA, 22 bp, synthetic construct
  misc_feature 1..22: note = Synthetic construct
  source 1..22: mol_type = other DNA
aaggcacctgggaggagagccg

SEQ ID NO: 7929 - DNA, 22 bp, synthetic construct
  misc_feature 1..22: note = Synthetic construct
  source 1..22: mol_type = other DNA
aggcacctgggaggagagccgt

SEQ ID NO: 7930 - DNA, 22 bp, synthetic construct
  misc_feature 1..22: note = Synthetic construct
  source 1..22: mol_type = other DNA
ggcacctgggaggagagccgta

SEQ ID NO: 7931 - DNA, 22 bp, synthetic construct
  misc_feature 1..22: note = Synthetic construct
  source 1..22: mol_type = other DNA
gcacctgggaggagagccgtac

SEQ ID NO: 7932 - DNA, 22 bp, synthetic construct
  misc_feature 1..22: note = Synthetic construct
  source 1..22: mol_type = other DNA
cacctgggaggagagccgtacc

SEQ ID NO: 7933 - DNA, 22 bp, synthetic construct
  misc_feature 1..22: note = Synthetic construct
  source 1..22: mol_type = other DNA
acctgggaggagagccgtaccc

SEQ ID NO: 7934 - DNA, 22 bp, synthetic construct
  misc_feature 1..22: note = Synthetic construct
  source 1..22: mol_type = other DNA
cctgggaggagagccgtaccca

SEQ ID NO: 7935 - DNA, 22 bp, synthetic construct
  misc_feature 1..22: note = Synthetic construct
  source 1..22: mol_type = other DNA
ctgggaggagagccgtacccac

SEQ ID NO: 7936 - DNA, 22 bp, synthetic construct
  misc_feature 1..22: note = Synthetic construct
  source 1..22: mol_type = other DNA
tgggaggagagccgtacccaca

SEQ ID NO: 7937 - DNA, 22 bp, synthetic construct
  misc_feature 1..22: note = Synthetic construct
  source 1..22: mol_type = other DNA
gggaggagagccgtacccacac

SEQ ID NO: 7938 - DNA, 22 bp, synthetic construct
  misc_feature 1..22: note = Synthetic construct
  source 1..22: mol_type = other DNA
ggaggagagccgtacccacacc

SEQ ID NO: 7939 - DNA, 22 bp, synthetic construct
  misc_feature 1..22: note = Synthetic construct
  source 1..22: mol_type = other DNA
gaggagagccgtacccacacct

SEQ ID NO: 7940 - DNA, 22 bp, synthetic construct
  misc_feature 1..22: note = Synthetic construct
  source 1..22: mol_type = other DNA
aggagagccgtacccacacctt

SEQ ID NO: 7941 - DNA, 22 bp, synthetic construct
  misc_feature 1..22: note = Synthetic construct
  source 1..22: mol_type = other DNA
ggagagccgtacccacacctta

SEQ ID NO: 7942 - DNA, 22 bp, synthetic construct
  misc_feature 1..22: note = Synthetic construct
  source 1..22: mol_type = other DNA
gagagccgtacccacaccttat

SEQ ID NO: 7943 - DNA, 22 bp, synthetic construct
  misc_feature 1..22: note = Synthetic construct
  source 1..22: mol_type = other DNA
agagccgtacccacaccttata

SEQ ID NO: 7944 - DNA, 22 bp, synthetic construct
  misc_feature 1..22: note = Synthetic construct
  source 1..22: mol_type = other DNA
gagccgtacccacaccttatag

SEQ ID NO: 7945 - DNA, 22 bp, synthetic construct
  misc_feature 1..22: note = Synthetic construct
  source 1..22: mol_type = other DNA
agccgtacccacaccttataga

SEQ ID NO: 7946 - DNA, 22 bp, synthetic construct
  misc_feature 1..22: note = Synthetic construct
  source 1..22: mol_type = other DNA
gccgtacccacaccttatagag

SEQ ID NO: 7947 - DNA, 22 bp, synthetic construct
  misc_feature 1..22: note = Synthetic construct
  source 1..22: mol_type = other DNA
ccgtacccacaccttatagagg

SEQ ID NO: 7948 - DNA, 22 bp, synthetic construct
  misc_feature 1..22: note = Synthetic construct
  source 1..22: mol_type = other DNA
cgtacccacaccttatagaggc

SEQ ID NO: 7949 - DNA, 22 bp, synthetic construct
  misc_feature 1..22: note = Synthetic construct
  source 1..22: mol_type = other DNA
gtacccacaccttatagaggcg

SEQ ID NO: 7950 - DNA, 22 bp, synthetic construct
  misc_feature 1..22: note = Synthetic construct
  source 1..22: mol_type = other DNA
tacccacaccttatagaggcgt

SEQ ID NO: 7951 - DNA, 22 bp, synthetic construct
  misc_feature 1..22: note = Synthetic construct
  source 1..22: mol_type = other DNA
acccacaccttatagaggcgtg

SEQ ID NO: 7952 - DNA, 22 bp, synthetic construct
  misc_feature 1..22: note = Synthetic construct
  source 1..22: mol_type = other DNA
cccacaccttatagaggcgtgg

SEQ ID NO: 7953 - DNA, 22 bp, synthetic construct
  misc_feature 1..22: note = Synthetic construct
  source 1..22: mol_type = other DNA
ccacaccttatagaggcgtgga

SEQ ID NO: 7954 - DNA, 22 bp, synthetic construct
  misc_feature 1..22: note = Synthetic construct
  source 1..22: mol_type = other DNA
cacaccttatagaggcgtggat

SEQ ID NO: 7955 - DNA, 22 bp, synthetic construct
  misc_feature 1..22: note = Synthetic construct
  source 1..22: mol_type = other DNA
acaccttatagaggcgtggatc

SEQ ID NO: 7956 - DNA, 22 bp, synthetic construct
  misc_feature 1..22: note = Synthetic construct
  source 1..22: mol_type = other DNA
caccttatagaggcgtggatct

SEQ ID NO: 7957 - DNA, 22 bp, synthetic construct
  misc_feature 1..22: note = Synthetic construct
  source 1..22: mol_type = other DNA
accttatagaggcgtggatctg

SEQ ID NO: 7958 - DNA, 22 bp, synthetic construct
  misc_feature 1..22: note = Synthetic construct
  source 1..22: mol_type = other DNA
ccttatagaggcgtggatctga

SEQ ID NO: 7959 - DNA, 22 bp, synthetic construct
  misc_feature 1..22: note = Synthetic construct
  source 1..22: mol_type = other DNA
cttatagaggcgtggatctgac

SEQ ID NO: 7960 - DNA, 22 bp, synthetic construct
  misc_feature 1..22: note = Synthetic construct
  source 1..22: mol_type = other DNA
ttatagaggcgtggatctgaca

SEQ ID NO: 7961 - DNA, 22 bp, synthetic construct
  misc_feature 1..22: note = Synthetic construct
  source 1..22: mol_type = other DNA
tatagaggcgtggatctgacat

SEQ ID NO: 7962 - DNA, 22 bp, synthetic construct
  misc_feature 1..22: note = Synthetic construct
  source 1..22: mol_type = other DNA
atagaggcgtggatctgacata

SEQ ID NO: 7963 - DNA, 22 bp, synthetic construct
  misc_feature 1..22: note = Synthetic construct
  source 1..22: mol_type = other DNA
tagaggcgtggatctgacatac

SEQ ID NO: 7964 - DNA, 22 bp, synthetic construct
  misc_feature 1..22: note = Synthetic construct
  source 1..22: mol_type = other DNA
agaggcgtggatctgacatacc

SEQ ID NO: 7965 - DNA, 22 bp, synthetic construct
  misc_feature 1..22: note = Synthetic construct
  source 1..22: mol_type = other DNA
gaggcgtggatctgacatacct

SEQ ID NO: 7966 - DNA, 22 bp, synthetic construct
  misc_feature 1..22: note = Synthetic construct
  source 1..22: mol_type = other DNA
aggcgtggatctgacatacctc

SEQ ID NO: 7967 - DNA, 22 bp, synthetic construct
  misc_feature 1..22: note = Synthetic construct
  source 1..22: mol_type = other DNA
ggcgtggatctgacatacctcc

SEQ ID NO: 7968 - DNA, 22 bp, synthetic construct
  misc_feature 1..22: note = Synthetic construct
  source 1..22: mol_type = other DNA
gcgtggatctgacatacctccg

SEQ ID NO: 7969 - DNA, 22 bp, synthetic construct
  misc_feature 1..22: note = Synthetic construct
  source 1..22: mol_type = other DNA
cgtggatctgacatacctccga

SEQ ID NO: 7970 - DNA, 22 bp, synthetic construct
  misc_feature 1..22: note = Synthetic construct
  source 1..22: mol_type = other DNA
gtggatctgacatacctccgac

SEQ ID NO: 7971 - DNA, 22 bp, synthetic construct
  misc_feature 1..22: note = Synthetic construct
  source 1..22: mol_type = other DNA
tggatctgacatacctccgaca

SEQ ID NO: 7972 - DNA, 22 bp, synthetic construct
  misc_feature 1..22: note = Synthetic construct
  source 1..22: mol_type = other DNA
ggatctgacatacctccgacaa

SEQ ID NO: 7973 - DNA, 22 bp, synthetic construct
  misc_feature 1..22: note = Synthetic construct
  source 1..22: mol_type = other DNA
gatctgacatacctccgacaac

SEQ ID NO: 7974 - DNA, 22 bp, synthetic construct
  misc_feature 1..22: note = Synthetic construct
  source 1..22: mol_type = other DNA
atctgacatacctccgacaact

SEQ ID NO: 7975 - DNA, 22 bp, synthetic construct
  misc_feature 1..22: note = Synthetic construct
  source 1..22: mol_type = other DNA
tctgacatacctccgacaactc

SEQ ID NO: 7976 - DNA, 22 bp, synthetic construct
  misc_feature 1..22: note = Synthetic construct
  source 1..22: mol_type = other DNA
ctgacatacctccgacaactcc

SEQ ID NO: 7977 - DNA, 22 bp, synthetic construct
  misc_feature 1..22: note = Synthetic construct
  source 1..22: mol_type = other DNA
tgacatacctccgacaactccc

SEQ ID NO: 7978 - DNA, 22 bp, synthetic construct
  misc_feature 1..22: note = Synthetic construct
  source 1..22: mol_type = other DNA
gacatacctccgacaactcccc

SEQ ID NO: 7979 - DNA, 22 bp, synthetic construct
  misc_feature 1..22: note = Synthetic construct
  source 1..22: mol_type = other DNA
acatacctccgacaactcccca

SEQ ID NO: 7980 - DNA, 22 bp, synthetic construct
  misc_feature 1..22: note = Synthetic construct
  source 1..22: mol_type = other DNA
catacctccgacaactccccaa

SEQ ID NO: 7981 - DNA, 22 bp, synthetic construct
  misc_feature 1..22: note = Synthetic construct
  source 1..22: mol_type = other DNA
atacctccgacaactccccaac

SEQ ID NO: 7982 - DNA, 22 bp, synthetic construct
  misc_feature 1..22: note = Synthetic construct
  source 1..22: mol_type = other DNA
tacctccgacaactccccaacc

SEQ ID NO: 7983 - DNA, 22 bp, synthetic construct
  misc_feature 1..22: note = Synthetic construct
  source 1..22: mol_type = other DNA
acctccgacaactccccaaccc

SEQ ID NO: 7984 - DNA, 22 bp, synthetic construct
  misc_feature 1..22: note = Synthetic construct
  source 1..22: mol_type = other DNA
cctccgacaactccccaacccc

SEQ ID NO: 7985 - DNA, 22 bp, synthetic construct
  misc_feature 1..22: note = Synthetic construct
  source 1..22: mol_type = other DNA
ctccgacaactccccaaccccg

SEQ ID NO: 7986 - DNA, 22 bp, synthetic construct
  misc_feature 1..22: note = Synthetic construct
  source 1..22: mol_type = other DNA
tccgacaactccccaaccccgt

SEQ ID NO: 7987 - DNA, 22 bp, synthetic construct
  misc_feature 1..22: note = Synthetic construct
  source 1..22: mol_type = other DNA
ccgacaactccccaaccccgta

SEQ ID NO: 7988 - DNA, 22 bp, synthetic construct
  misc_feature 1..22: note = Synthetic construct
  source 1..22: mol_type = other DNA
cgacaactccccaaccccgtag

SEQ ID NO: 7989 - DNA, 22 bp, synthetic construct
  misc_feature 1..22: note = Synthetic construct
  source 1..22: mol_type = other DNA
gacaactccccaaccccgtagc

SEQ ID NO: 7990 - DNA, 22 bp, synthetic construct
  misc_feature 1..22: note = Synthetic construct
  source 1..22: mol_type = other DNA
acaactccccaaccccgtagcc

SEQ ID NO: 7991 - DNA, 22 bp, synthetic construct
  misc_feature 1..22: note = Synthetic construct
  source 1..22: mol_type = other DNA
caactccccaaccccgtagccg

SEQ ID NO: 7992 - DNA, 22 bp, synthetic construct
  misc_feature 1..22: note = Synthetic construct
  source 1..22: mol_type = other DNA
aactccccaaccccgtagccga

SEQ ID NO: 7993 - DNA, 22 bp, synthetic construct
  misc_feature 1..22: note = Synthetic construct
  source 1..22: mol_type = other DNA
actccccaaccccgtagccgat

SEQ ID NO: 7994 - DNA, 22 bp, synthetic construct
  misc_feature 1..22: note = Synthetic construct
  source 1..22: mol_type = other DNA
ctccccaaccccgtagccgatt

SEQ ID NO: 7995 - DNA, 22 bp, synthetic construct
  misc_feature 1..22: note = Synthetic construct
  source 1..22: mol_type = other DNA
tccccaaccccgtagccgattt

SEQ ID NO: 7996 - DNA, 22 bp, synthetic construct
  misc_feature 1..22: note = Synthetic construct
  source 1..22: mol_type = other DNA
ccccaaccccgtagccgattta

SEQ ID NO: 7997 - DNA, 22 bp, synthetic construct
  misc_feature 1..22: note = Synthetic construct
  source 1..22: mol_type = other DNA
cccaaccccgtagccgatttaa

SEQ ID NO: 7998 - DNA, 22 bp, synthetic construct
  misc_feature 1..22: note = Synthetic construct
  source 1..22: mol_type = other DNA
ccaaccccgtagccgatttaat

SEQ ID NO: 7999 - DNA, 22 bp, synthetic construct
  misc_feature 1..22: note = Synthetic construct
  source 1..22: mol_type = other DNA
caaccccgtagccgatttaata

SEQ ID NO: 8000 - DNA, 22 bp, synthetic construct
  misc_feature 1..22: note = Synthetic construct
  source 1..22: mol_type = other DNA
aaccccgtagccgatttaatat

SEQ ID NO: 8001 - DNA, 22 bp, synthetic construct
  misc_feature 1..22: note = Synthetic construct
  source 1..22: mol_type = other DNA
accccgtagccgatttaatatc

SEQ ID NO: 8002 - DNA, 22 bp, synthetic construct
  misc_feature 1..22: note = Synthetic construct
  source 1..22: mol_type = other DNA
ccccgtagccgatttaatatca

SEQ ID NO: 8003 - DNA, 22 bp, synthetic construct
  misc_feature 1..22: note = Synthetic construct
  source 1..22: mol_type = other DNA
cccgtagccgatttaatatcag

SEQ ID NO: 8004 - DNA, 22 bp, synthetic construct
  misc_feature 1..22: note = Synthetic construct
  source 1..22: mol_type = other DNA
ccgtagccgatttaatatcagc

SEQ ID NO: 8005 - DNA, 22 bp, synthetic construct
  misc_feature 1..22: note = Synthetic construct
  source 1..22: mol_type = other DNA
cgtagccgatttaatatcagca

SEQ ID NO: 8006 - DNA, 22 bp, synthetic construct
  misc_feature 1..22: note = Synthetic construct
  source 1..22: mol_type = other DNA
gtagccgatttaatatcagcat

SEQ ID NO: 8007 - DNA, 22 bp, synthetic construct
  misc_feature 1..22: note = Synthetic construct
  source 1..22: mol_type = other DNA
tagccgatttaatatcagcatc

SEQ ID NO: 8008 - DNA, 22 bp, synthetic construct
  misc_feature 1..22: note = Synthetic construct
  source 1..22: mol_type = other DNA
agccgatttaatatcagcatca

SEQ ID NO: 8009 - DNA, 22 bp, synthetic construct
  misc_feature 1..22: note = Synthetic construct
  source 1..22: mol_type = other DNA
gccgatttaatatcagcatcag

SEQ ID NO: 8010 - DNA, 22 bp, synthetic construct
  misc_feature 1..22: note = Synthetic construct
  source 1..22: mol_type = other DNA
ccgatttaatatcagcatcagg

SEQ ID NO: 8011 - DNA, 22 bp, synthetic construct
  misc_feature 1..22: note = Synthetic construct
  source 1..22: mol_type = other DNA
cgatttaatatcagcatcaggg

SEQ ID NO: 8012 - DNA, 22 bp, synthetic construct
  misc_feature 1..22: note = Synthetic construct
  source 1..22: mol_type = other DNA
gatttaatatcagcatcagggc

SEQ ID NO: 8013 - DNA, 22 bp, synthetic construct
  misc_feature 1..22: note = Synthetic construct
  source 1..22: mol_type = other DNA
atttaatatcagcatcagggcg

SEQ ID NO: 8014 - DNA, 22 bp, synthetic construct
  misc_feature 1..22: note = Synthetic construct
  source 1..22: mol_type = other DNA
tttaatatcagcatcagggcga

SEQ ID NO: 8015 - DNA, 22 bp, synthetic construct
  misc_feature 1..22: note = Synthetic construct
  source 1..22: mol_type = other DNA
ttaatatcagcatcagggcgaa

SEQ ID NO: 8016 - DNA, 22 bp, synthetic construct
  misc_feature 1..22: note = Synthetic construct
  source 1..22: mol_type = other DNA
taatatcagcatcagggcgaag

SEQ ID NO: 8017 - DNA, 22 bp, synthetic construct
  misc_feature 1..22: note = Synthetic construct
  source 1..22: mol_type = other DNA
aatatcagcatcagggcgaaga

SEQ ID NO: 8018 - DNA, 22 bp, synthetic construct
  misc_feature 1..22: note = Synthetic construct
  source 1..22: mol_type = other DNA
atatcagcatcagggcgaagag

SEQ ID NO: 8019 - DNA, 22 bp, synthetic construct
  misc_feature 1..22: note = Synthetic construct
  source 1..22: mol_type = other DNA
tatcagcatcagggcgaagaga

SEQ ID NO: 8020 - DNA, 22 bp, synthetic construct
  misc_feature 1..22: note = Synthetic construct
  source 1..22: mol_type = other DNA
atcagcatcagggcgaagagat

SEQ ID NO: 8021 - DNA, 22 bp, synthetic construct
  misc_feature 1..22: note = Synthetic construct
  source 1..22: mol_type = other DNA
tcagcatcagggcgaagagatt

SEQ ID NO: 8022 - DNA, 22 bp, synthetic construct
  misc_feature 1..22: note = Synthetic construct
  source 1..22: mol_type = other DNA
cagcatcagggcgaagagattg

SEQ ID NO: 8023 - DNA, 22 bp, synthetic construct
  misc_feature 1..22: note = Synthetic construct
  source 1..22: mol_type = other DNA
agcatcagggcgaagagattgt

SEQ ID NO: 8024 - DNA, 22 bp, synthetic construct
  misc_feature 1..22: note = Synthetic construct
  source 1..22: mol_type = other DNA
gcatcagggcgaagagattgtc

SEQ ID NO: 8025 - DNA, 22 bp, synthetic construct
  misc_feature 1..22: note = Synthetic construct
  source 1..22: mol_type = other DNA
catcagggcgaagagattgtca

SEQ ID NO: 8026 - DNA, 22 bp, synthetic construct
  misc_feature 1..22: note = Synthetic construct
  source 1..22: mol_type = other DNA
atcagggcgaagagattgtcaa

SEQ ID NO: 8027 - DNA, 22 bp, synthetic construct
  misc_feature 1..22: note = Synthetic construct
  source 1..22: mol_type = other DNA
tcagggcgaagagattgtcaac

SEQ ID NO: 8028 - DNA, 22 bp, synthetic construct
  misc_feature 1..22: note = Synthetic construct
  source 1..22: mol_type = other DNA
cagggcgaagagattgtcaaca

SEQ ID NO: 8029 - DNA, 22 bp, synthetic construct
  misc_feature 1..22: note = Synthetic construct
  source 1..22: mol_type = other DNA
agggcgaagagattgtcaacag

SEQ ID NO: 8030 - DNA, 22 bp, synthetic construct
  misc_feature 1..22: note = Synthetic construct
  source 1..22: mol_type = other DNA
gggcgaagagattgtcaacagg

SEQ ID NO: 8031 - DNA, 22 bp, synthetic construct
  misc_feature 1..22: note = Synthetic construct
  source 1..22: mol_type = other DNA
ggcgaagagattgtcaacaggt

SEQ ID NO: 8032 - DNA, 22 bp, synthetic construct
  misc_feature 1..22: note = Synthetic construct
  source 1..22: mol_type = other DNA
gcgaagagattgtcaacaggtt

SEQ ID NO: 8033 - DNA, 22 bp, synthetic construct
  misc_feature 1..22: note = Synthetic construct
  source 1..22: mol_type = other DNA
cgaagagattgtcaacaggttt

SEQ ID NO: 8034 - DNA, 22 bp, synthetic construct
  misc_feature 1..22: note = Synthetic construct
  source 1..22: mol_type = other DNA
gaagagattgtcaacaggtttc

SEQ ID NO: 8035 - DNA, 22 bp, synthetic construct
  misc_feature 1..22: note = Synthetic construct
  source 1..22: mol_type = other DNA
aagagattgtcaacaggtttct

SEQ ID NO: 8036 - DNA, 22 bp, synthetic construct
  misc_feature 1..22: note = Synthetic construct
  source 1..22: mol_type = other DNA
agagattgtcaacaggtttctt

SEQ ID NO: 8037 - DNA, 22 bp, synthetic construct
  misc_feature 1..22: note = Synthetic construct
  source 1..22: mol_type = other DNA
gagattgtcaacaggtttcttg

SEQ ID NO: 8038 - DNA, 22 bp, synthetic construct
  misc_feature 1..22: note = Synthetic construct
  source 1..22: mol_type = other DNA
agattgtcaacaggtttcttga

SEQ ID NO: 8039 - DNA, 22 bp, synthetic construct
  misc_feature 1..22: note = Synthetic construct
  source 1..22: mol_type = other DNA
gattgtcaacaggtttcttgat

SEQ ID NO: 8040 - DNA, 22 bp, synthetic construct
  misc_feature 1..22: note = Synthetic construct
  source 1..22: mol_type = other DNA
attgtcaacaggtttcttgatg

SEQ ID NO: 8041 - DNA, 22 bp, synthetic construct
  misc_feature 1..22: note = Synthetic construct
  source 1..22: mol_type = other DNA
ttgtcaacaggtttcttgatgt

SEQ ID NO: 8042 - DNA, 22 bp, synthetic construct
  misc_feature 1..22: note = Synthetic construct
  source 1..22: mol_type = other DNA
tgtcaacaggtttcttgatgta

SEQ ID NO: 8043 - DNA, 22 bp, synthetic construct
  misc_feature 1..22: note = Synthetic construct
  source 1..22: mol_type = other DNA
gtcaacaggtttcttgatgtaa

SEQ ID NO: 8044 - DNA, 22 bp, synthetic construct
  misc_feature 1..22: note = Synthetic construct
  source 1..22: mol_type = other DNA
tcaacaggtttcttgatgtaaa

SEQ ID NO: 8045 - DNA, 22 bp, synthetic construct
  misc_feature 1..22: note = Synthetic construct
  source 1..22: mol_type = other DNA
caacaggtttcttgatgtaaaa

SEQ ID NO: 8046 - DNA, 22 bp, synthetic construct
  misc_feature 1..22: note = Synthetic construct
  source 1..22: mol_type = other DNA
aacaggtttcttgatgtaaaac

SEQ ID NO: 8047 - DNA, 22 bp, synthetic construct
  misc_feature 1..22: note = Synthetic construct
  source 1..22: mol_type = other DNA
acaggtttcttgatgtaaaacg

SEQ ID NO: 8048 - DNA, 22 bp, synthetic construct
  misc_feature 1..22: note = Synthetic construct
  source 1..22: mol_type = other DNA
caggtttcttgatgtaaaacgg

SEQ ID NO: 8049 - DNA, 22 bp, synthetic construct
  misc_feature 1..22: note = Synthetic construct
  source 1..22: mol_type = other DNA
aggtttcttgatgtaaaacggt

SEQ ID NO: 8050 - DNA, 22 bp, synthetic construct
  misc_feature 1..22: note = Synthetic construct
  source 1..22: mol_type = other DNA
ggtttcttgatgtaaaacggtt

SEQ ID NO: 8051 - DNA, 22 bp, synthetic construct
  misc_feature 1..22: note = Synthetic construct
  source 1..22: mol_type = other DNA
gtttcttgatgtaaaacggttt

SEQ ID NO: 8052 - DNA, 22 bp, synthetic construct
  misc_feature 1..22: note = Synthetic construct
  source 1..22: mol_type = other DNA
tttcttgatgtaaaacggtttg

SEQ ID NO: 8053 - DNA, 22 bp, synthetic construct
  misc_feature 1..22: note = Synthetic construct
  source 1..22: mol_type = other DNA
ttcttgatgtaaaacggtttga

SEQ ID NO: 8054 - DNA, 22 bp, synthetic construct
  misc_feature 1..22: note = Synthetic construct
  source 1..22: mol_type = other DNA
tcttgatgtaaaacggtttgac

SEQ ID NO: 8055 - DNA, 22 bp, synthetic construct
  misc_feature 1..22: note = Synthetic construct
  source 1..22: mol_type = other DNA
cttgatgtaaaacggtttgaca

SEQ ID NO: 8056 - DNA, 22 bp, synthetic construct
  misc_feature 1..22: note = Synthetic construct
  source 1..22: mol_type = other DNA
ttgatgtaaaacggtttgacat

SEQ ID NO: 8057 - DNA, 22 bp, synthetic construct
  misc_feature 1..22: note = Synthetic construct
  source 1..22: mol_type = other DNA
tgatgtaaaacggtttgacatc

SEQ ID NO: 8058 - DNA, 22 bp, synthetic construct
  misc_feature 1..22: note = Synthetic construct
  source 1..22: mol_type = other DNA
gatgtaaaacggtttgacatcg

SEQ ID NO: 8059 - DNA, 22 bp, synthetic construct
  misc_feature 1..22: note = Synthetic construct
  source 1..22: mol_type = other DNA
atgtaaaacggtttgacatcga

SEQ ID NO: 8060 - DNA, 22 bp, synthetic construct
  misc_feature 1..22: note = Synthetic construct
  source 1..22: mol_type = other DNA
tgtaaaacggtttgacatcgac

SEQ ID NO: 8061 - DNA, 22 bp, synthetic construct
  misc_feature 1..22: note = Synthetic construct
  source 1..22: mol_type = other DNA
gtaaaacggtttgacatcgaca

SEQ ID NO: 8062 - DNA, 22 bp, synthetic construct
  misc_feature 1..22: note = Synthetic construct
  source 1..22: mol_type = other DNA
taaaacggtttgacatcgacac

SEQ ID NO: 8063 - DNA, 22 bp, synthetic construct
  misc_feature 1..22: note = Synthetic construct
  source 1..22: mol_type = other DNA
aaaacggtttgacatcgacacc

SEQ ID NO: 8064 - DNA, 22 bp, synthetic construct
  misc_feature 1..22: note = Synthetic construct
  source 1..22: mol_type = other DNA
aaacggtttgacatcgacacca

SEQ ID NO: 8065 - DNA, 22 bp, synthetic construct
  misc_feature 1..22: note = Synthetic construct
  source 1..22: mol_type = other DNA
aacggtttgacatcgacaccac

SEQ ID NO: 8066 - DNA, 22 bp, synthetic construct
  misc_feature 1..22: note = Synthetic construct
  source 1..22: mol_type = other DNA
acggtttgacatcgacaccacg

SEQ ID NO: 8067 - DNA, 22 bp, synthetic construct
  misc_feature 1..22: note = Synthetic construct
  source 1..22: mol_type = other DNA
cggtttgacatcgacaccacgg

SEQ ID NO: 8068 - DNA, 22 bp, synthetic construct
  misc_feature 1..22: note = Synthetic construct
  source 1..22: mol_type = other DNA
ggtttgacatcgacaccacggt

SEQ ID NO: 8069 - DNA, 22 bp, synthetic construct
  misc_feature 1..22: note = Synthetic construct
  source 1..22: mol_type = other DNA
gtttgacatcgacaccacggta

SEQ ID NO: 8070 - DNA, 22 bp, synthetic construct
  misc_feature 1..22: note = Synthetic construct
  source 1..22: mol_type = other DNA
tttgacatcgacaccacggtaa

SEQ ID NO: 8071 - DNA, 22 bp, synthetic construct
  misc_feature 1..22: note = Synthetic construct
  source 1..22: mol_type = other DNA
ttgacatcgacaccacggtaaa

SEQ ID NO: 8072 - DNA, 22 bp, synthetic construct
  misc_feature 1..22: note = Synthetic construct
  source 1..22: mol_type = other DNA
tgacatcgacaccacggtaaaa

SEQ ID NO: 8073 - DNA, 22 bp, synthetic construct
  misc_feature 1..22: note = Synthetic construct
  source 1..22: mol_type = other DNA
gacatcgacaccacggtaaaag

SEQ ID NO: 8074 - DNA, 22 bp, synthetic construct
  misc_feature 1..22: note = Synthetic construct
  source 1..22: mol_type = other DNA
acatcgacaccacggtaaaagt

SEQ ID NO: 8075 - DNA, 22 bp, synthetic construct
  misc_feature 1..22: note = Synthetic construct
  source 1..22: mol_type = other DNA
catcgacaccacggtaaaagtg

SEQ ID NO: 8076 - DNA, 22 bp, synthetic construct
  misc_feature 1..22: note = Synthetic construct
  source 1..22: mol_type = other DNA
atcgacaccacggtaaaagtgc

SEQ ID NO: 8077 - DNA, 22 bp, synthetic construct
  misc_feature 1..22: note = Synthetic construct
  source 1..22: mol_type = other DNA
tcgacaccacggtaaaagtgcg

SEQ ID NO: 8078 - DNA, 22 bp, synthetic construct
  misc_feature 1..22: note = Synthetic construct
  source 1..22: mol_type = other DNA
cgacaccacggtaaaagtgcgc

SEQ ID NO: 8079 - DNA, 22 bp, synthetic construct
  misc_feature 1..22: note = Synthetic construct
  source 1..22: mol_type = other DNA
gacaccacggtaaaagtgcgcg

SEQ ID NO: 8080 - DNA, 22 bp, synthetic construct
  misc_feature 1..22: note = Synthetic construct
  source 1..22: mol_type = other DNA
acaccacggtaaaagtgcgcgc

SEQ ID NO: 8081 - DNA, 22 bp, synthetic construct
  misc_feature 1..22: note = Synthetic construct
  source 1..22: mol_type = other DNA
caccacggtaaaagtgcgcgcc

SEQ ID NO: 8082 - DNA, 22 bp, synthetic construct
  misc_feature 1..22: note = Synthetic construct
  source 1..22: mol_type = other DNA
accacggtaaaagtgcgcgccg

SEQ ID NO: 8083 - DNA, 22 bp, synthetic construct
  misc_feature 1..22: note = Synthetic construct
  source 1..22: mol_type = other DNA
ccacggtaaaagtgcgcgccgc

SEQ ID NO: 8084 - DNA, 22 bp, synthetic construct
  misc_feature 1..22: note = Synthetic construct
  source 1..22: mol_type = other DNA
cacggtaaaagtgcgcgccgca

SEQ ID NO: 8085 - DNA, 22 bp, synthetic construct
  misc_feature 1..22: note = Synthetic construct
  source 1..22: mol_type = other DNA
acggtaaaagtgcgcgccgcag

SEQ ID NO: 8086 - DNA, 22 bp, synthetic construct
  misc_feature 1..22: note = Synthetic construct
  source 1..22: mol_type = other DNA
cggtaaaagtgcgcgccgcagc

SEQ ID NO: 8087 - DNA, 22 bp, synthetic construct
  misc_feature 1..22: note = Synthetic construct
  source 1..22: mol_type = other DNA
ggtaaaagtgcgcgccgcagct

SEQ ID NO: 8088 - DNA, 22 bp, synthetic construct
  misc_feature 1..22: note = Synthetic construct
  source 1..22: mol_type = other DNA
gtaaaagtgcgcgccgcagctc

SEQ ID NO: 8089 - DNA, 22 bp, synthetic construct
  misc_feature 1..22: note = Synthetic construct
  source 1..22: mol_type = other DNA
taaaagtgcgcgccgcagctct

SEQ ID NO: 8090 - DNA, 22 bp, synthetic construct
  misc_feature 1..22: note = Synthetic construct
  source 1..22: mol_type = other DNA
aaaagtgcgcgccgcagctctc

SEQ ID NO: 8091 - DNA, 22 bp, synthetic construct
  misc_feature 1..22: note = Synthetic construct
  source 1..22: mol_type = other DNA
aaagtgcgcgccgcagctctcg

SEQ ID NO: 8092 - DNA, 22 bp, synthetic construct
  misc_feature 1..22: note = Synthetic construct
  source 1..22: mol_type = other DNA
aagtgcgcgccgcagctctcgc

SEQ ID NO: 8093 - DNA, 22 bp, synthetic construct
  misc_feature 1..22: note = Synthetic construct
  source 1..22: mol_type = other DNA
agtgcgcgccgcagctctcgcg

SEQ ID NO: 8094 - DNA, 22 bp, synthetic construct
  misc_feature 1..22: note = Synthetic construct
  source 1..22: mol_type = other DNA
gtgcgcgccgcagctctcgcga

SEQ ID NO: 8095 - DNA, 22 bp, synthetic construct
  misc_feature 1..22: note = Synthetic construct
  source 1..22: mol_type = other DNA
tgcgcgccgcagctctcgcgaa

SEQ ID NO: 8096 - DNA, 22 bp, synthetic construct
  misc_feature 1..22: note = Synthetic construct
  source 1..22: mol_type = other DNA
gcgcgccgcagctctcgcgaaa

SEQ ID NO: 8097 - DNA, 22 bp, synthetic construct
  misc_feature 1..22: note = Synthetic construct
  source 1..22: mol_type = other DNA
cgcgccgcagctctcgcgaaag

SEQ ID NO: 8098 - DNA, 22 bp, synthetic construct
  misc_feature 1..22: note = Synthetic construct
  source 1..22: mol_type = other DNA
gcgccgcagctctcgcgaaaga

SEQ ID NO: 8099 - DNA, 22 bp, synthetic construct
  misc_feature 1..22: note = Synthetic construct
  source 1..22: mol_type = other DNA
cgccgcagctctcgcgaaagag

SEQ ID NO: 8100 - DNA, 22 bp, synthetic construct
  misc_feature 1..22: note = Synthetic construct
  source 1..22: mol_type = other DNA
gccgcagctctcgcgaaagagc

SEQ ID NO: 8101 - DNA, 22 bp, synthetic construct
  misc_feature 1..22: note = Synthetic construct
  source 1..22: mol_type = other DNA
ccgcagctctcgcgaaagagcc

SEQ ID NO: 8102 - DNA, 22 bp, synthetic construct
  misc_feature 1..22: note = Synthetic construct
  source 1..22: mol_type = other DNA
cgcagctctcgcgaaagagccc

SEQ ID NO: 8103 - DNA, 22 bp, synthetic construct
  misc_feature 1..22: note = Synthetic construct
  source 1..22: mol_type = other DNA
gcagctctcgcgaaagagcccg

SEQ ID NO: 8104 - DNA, 22 bp, synthetic construct
  misc_feature 1..22: note = Synthetic construct
  source 1..22: mol_type = other DNA
cagctctcgcgaaagagcccgg

SEQ ID NO: 8105 - DNA, 22 bp, synthetic construct
  misc_feature 1..22: note = Synthetic construct
  source 1..22: mol_type = other DNA
agctctcgcgaaagagcccgga

SEQ ID NO: 8106 - DNA, 22 bp, synthetic construct
  misc_feature 1..22: note = Synthetic construct
  source 1..22: mol_type = other DNA
gctctcgcgaaagagcccggac

SEQ ID NO: 8107 - DNA, 22 bp, synthetic construct
  misc_feature 1..22: note = Synthetic construct
  source 1..22: mol_type = other DNA
ctctcgcgaaagagcccggaca

SEQ ID NO: 8108 - DNA, 22 bp, synthetic construct
  misc_feature 1..22: note = Synthetic construct
  source 1..22: mol_type = other DNA
tctcgcgaaagagcccggacac

SEQ ID NO: 8109 - DNA, 22 bp, synthetic construct
  misc_feature 1..22: note = Synthetic construct
  source 1..22: mol_type = other DNA
ctcgcgaaagagcccggacacg

SEQ ID NO: 8110 - DNA, 22 bp, synthetic construct
  misc_feature 1..22: note = Synthetic construct
  source 1..22: mol_type = other DNA
tcgcgaaagagcccggacacga

SEQ ID NO: 8111 - DNA, 22 bp, synthetic construct
  misc_feature 1..22: note = Synthetic construct
  source 1..22: mol_type = other DNA
cgcgaaagagcccggacacgaa

SEQ ID NO: 8112 - DNA, 22 bp, synthetic construct
  misc_feature 1..22: note = Synthetic construct
  source 1..22: mol_type = other DNA
gcgaaagagcccggacacgaac

SEQ ID NO: 8113 - DNA, 22 bp, synthetic construct
  misc_feature 1..22: note = Synthetic construct
  source 1..22: mol_type = other DNA
cgaaagagcccggacacgaacg

SEQ ID NO: 8114 - DNA, 22 bp, synthetic construct
  misc_feature 1..22: note = Synthetic construct
  source 1..22: mol_type = other DNA
gaaagagcccggacacgaacgt

SEQ ID NO: 8115 - DNA, 22 bp, synthetic construct
  misc_feature 1..22: note = Synthetic construct
  source 1..22: mol_type = other DNA
aaagagcccggacacgaacgtt

SEQ ID NO: 8116 - DNA, 22 bp, synthetic construct
  misc_feature 1..22: note = Synthetic construct
  source 1..22: mol_type = other DNA
aagagcccggacacgaacgttt

SEQ ID NO: 8117 - DNA, 22 bp, synthetic construct
  misc_feature 1..22: note = Synthetic construct
  source 1..22: mol_type = other DNA
agagcccggacacgaacgtttt

SEQ ID NO: 8118 - DNA, 22 bp, synthetic construct
  misc_feature 1..22: note = Synthetic construct
  source 1..22: mol_type = other DNA
gagcccggacacgaacgtttta

SEQ ID NO: 8119 - DNA, 22 bp, synthetic construct
  misc_feature 1..22: note = Synthetic construct
  source 1..22: mol_type = other DNA
agcccggacacgaacgttttac

SEQ ID NO: 8120 - DNA, 22 bp, synthetic construct
  misc_feature 1..22: note = Synthetic construct
  source 1..22: mol_type = other DNA
gcccggacacgaacgttttacg

SEQ ID NO: 8121 - DNA, 22 bp, synthetic construct
  misc_feature 1..22: note = Synthetic construct
  source 1..22: mol_type = other DNA
cccggacacgaacgttttacga

SEQ ID NO: 8122 - DNA, 22 bp, synthetic construct
  misc_feature 1..22: note = Synthetic construct
  source 1..22: mol_type = other DNA
ccggacacgaacgttttacgaa

SEQ ID NO: 8123 - DNA, 22 bp, synthetic construct
  misc_feature 1..22: note = Synthetic construct
  source 1..22: mol_type = other DNA
cggacacgaacgttttacgaag

SEQ ID NO: 8124 - DNA, 22 bp, synthetic construct
  misc_feature 1..22: note = Synthetic construct
  source 1..22: mol_type = other DNA
ggacacgaacgttttacgaaga

SEQ ID NO: 8125 - DNA, 22 bp, synthetic construct
  misc_feature 1..22: note = Synthetic construct
  source 1..22: mol_type = other DNA
gacacgaacgttttacgaagat

SEQ ID NO: 8126 - DNA, 22 bp, synthetic construct
  misc_feature 1..22: note = Synthetic construct
  source 1..22: mol_type = other DNA
acacgaacgttttacgaagatt

SEQ ID NO: 8127 - DNA, 22 bp, synthetic construct
  misc_feature 1..22: note = Synthetic construct
  source 1..22: mol_type = other DNA
cacgaacgttttacgaagattc

SEQ ID NO: 8128 - DNA, 22 bp, synthetic construct
  misc_feature 1..22: note = Synthetic construct
  source 1..22: mol_type = other DNA
acgaacgttttacgaagattcg

SEQ ID NO: 8129 - DNA, 22 bp, synthetic construct
  misc_feature 1..22: note = Synthetic construct
  source 1..22: mol_type = other DNA
cgaacgttttacgaagattcgg

SEQ ID NO: 8130 - DNA, 22 bp, synthetic construct
  misc_feature 1..22: note = Synthetic construct
  source 1..22: mol_type = other DNA
gaacgttttacgaagattcggt

SEQ ID NO: 8131 - DNA, 22 bp, synthetic construct
  misc_feature 1..22: note = Synthetic construct
  source 1..22: mol_type = other DNA
aacgttttacgaagattcggtt

SEQ ID NO: 8132 - DNA, 22 bp, synthetic construct
  misc_feature 1..22: note = Synthetic construct
  source 1..22: mol_type = other DNA
acgttttacgaagattcggttt

SEQ ID NO: 8133 - DNA, 22 bp, synthetic construct
  misc_feature 1..22: note = Synthetic construct
  source 1..22: mol_type = other DNA
cgttttacgaagattcggttta

SEQ ID NO: 8134 - DNA, 22 bp, synthetic construct
  misc_feature 1..22: note = Synthetic construct
  source 1..22: mol_type = other DNA
gttttacgaagattcggtttaa

SEQ ID NO: 8135 - DNA, 22 bp, synthetic construct
  misc_feature 1..22: note = Synthetic construct
  source 1..22: mol_type = other DNA
ttttacgaagattcggtttaaa

SEQ ID NO: 8136 - DNA, 22 bp, synthetic construct
  misc_feature 1..22: note = Synthetic construct
  source 1..22: mol_type = other DNA
tttacgaagattcggtttaaaa

SEQ ID NO: 8137 - DNA, 22 bp, synthetic construct
  misc_feature 1..22: note = Synthetic construct
  source 1..22: mol_type = other DNA
ttacgaagattcggtttaaaac

SEQ ID NO: 8138 - DNA, 22 bp, synthetic construct
  misc_feature 1..22: note = Synthetic construct
  source 1..22: mol_type = other DNA
tacgaagattcggtttaaaacc

SEQ ID NO: 8139 - DNA, 22 bp, synthetic construct
  misc_feature 1..22: note = Synthetic construct
  source 1..22: mol_type = other DNA
acgaagattcggtttaaaaccg

SEQ ID NO: 8140 - DNA, 22 bp, synthetic construct
  misc_feature 1..22: note = Synthetic construct
  source 1..22: mol_type = other DNA
cgaagattcggtttaaaaccgt

SEQ ID NO: 8141 - DNA, 22 bp, synthetic construct
  misc_feature 1..22: note = Synthetic construct
  source 1..22: mol_type = other DNA
gaagattcggtttaaaaccgta

SEQ ID NO: 8142 - DNA, 22 bp, synthetic construct
  misc_feature 1..22: note = Synthetic construct
  source 1..22: mol_type = other DNA
aagattcggtttaaaaccgtag

SEQ ID NO: 8143 - DNA, 22 bp, synthetic construct
  misc_feature 1..22: note = Synthetic construct
  source 1..22: mol_type = other DNA
agattcggtttaaaaccgtagt

SEQ ID NO: 8144 - DNA, 22 bp, synthetic construct
  misc_feature 1..22: note = Synthetic construct
  source 1..22: mol_type = other DNA
gattcggtttaaaaccgtagta

SEQ ID NO: 8145 - DNA, 22 bp, synthetic construct
  misc_feature 1..22: note = Synthetic construct
  source 1..22: mol_type = other DNA
attcggtttaaaaccgtagtag

SEQ ID NO: 8146 - DNA, 22 bp, synthetic construct
  misc_feature 1..22: note = Synthetic construct
  source 1..22: mol_type = other DNA
ttcggtttaaaaccgtagtagg

SEQ ID NO: 8147 - DNA, 22 bp, synthetic construct
  misc_feature 1..22: note = Synthetic construct
  source 1..22: mol_type = other DNA
tcggtttaaaaccgtagtaggc

SEQ ID NO: 8148 - DNA, 22 bp, synthetic construct
  misc_feature 1..22: note = Synthetic construct
  source 1..22: mol_type = other DNA
cggtttaaaaccgtagtaggca

SEQ ID NO: 8149 - DNA, 22 bp, synthetic construct
  misc_feature 1..22: note = Synthetic construct
  source 1..22: mol_type = other DNA
ggtttaaaaccgtagtaggcaa

SEQ ID NO: 8150 - DNA, 22 bp, synthetic construct
  misc_feature 1..22: note = Synthetic construct
  source 1..22: mol_type = other DNA
gtttaaaaccgtagtaggcaag

SEQ ID NO: 8151 - DNA, 22 bp, synthetic construct
  misc_feature 1..22: note = Synthetic construct
  source 1..22: mol_type = other DNA
tttaaaaccgtagtaggcaagt

SEQ ID NO: 8152 - DNA, 22 bp, synthetic construct
  misc_feature 1..22: note = Synthetic construct
  source 1..22: mol_type = other DNA
ttaaaaccgtagtaggcaagtg

SEQ ID NO: 8153 - DNA, 22 bp, synthetic construct
  misc_feature 1..22: note = Synthetic construct
  source 1..22: mol_type = other DNA
taaaaccgtagtaggcaagtgc

SEQ ID NO: 8154 - DNA, 22 bp, synthetic construct
  misc_feature 1..22: note = Synthetic construct
  source 1..22: mol_type = other DNA
aaaaccgtagtaggcaagtgcc

SEQ ID NO: 8155 - DNA, 22 bp, synthetic construct
  misc_feature 1..22: note = Synthetic construct
  source 1..22: mol_type = other DNA
aaaccgtagtaggcaagtgcct

SEQ ID NO: 8156 - DNA, 22 bp, synthetic construct
  misc_feature 1..22: note = Synthetic construct
  source 1..22: mol_type = other DNA
aaccgtagtaggcaagtgcctc

SEQ ID NO: 8157 - DNA, 22 bp, synthetic construct
  misc_feature 1..22: note = Synthetic construct
  source 1..22: mol_type = other DNA
accgtagtaggcaagtgcctct

SEQ ID NO: 8158 - DNA, 22 bp, synthetic construct
  misc_feature 1..22: note = Synthetic construct
  source 1..22: mol_type = other DNA
ccgtagtaggcaagtgcctcta

SEQ ID NO: 8159 - DNA, 22 bp, synthetic construct
  misc_feature 1..22: note = Synthetic construct
  source 1..22: mol_type = other DNA
cgtagtaggcaagtgcctctag

SEQ ID NO: 8160 - DNA, 22 bp, synthetic construct
  misc_feature 1..22: note = Synthetic construct
  source 1..22: mol_type = other DNA
gtagtaggcaagtgcctctagc

SEQ ID NO: 8161 - DNA, 22 bp, synthetic construct
  misc_feature 1..22: note = Synthetic construct
  source 1..22: mol_type = other DNA
tagtaggcaagtgcctctagca

SEQ ID NO: 8162 - DNA, 22 bp, synthetic construct
  misc_feature 1..22: note = Synthetic construct
  source 1..22: mol_type = other DNA
agtaggcaagtgcctctagcac

SEQ ID NO: 8163 - DNA, 22 bp, synthetic construct
  misc_feature 1..22: note = Synthetic construct
  source 1..22: mol_type = other DNA
gtaggcaagtgcctctagcaca

SEQ ID NO: 8164 - DNA, 22 bp, synthetic construct
  misc_feature 1..22: note = Synthetic construct
  source 1..22: mol_type = other DNA
taggcaagtgcctctagcacac

SEQ ID NO: 8165 - DNA, 22 bp, synthetic construct
  misc_feature 1..22: note = Synthetic construct
  source 1..22: mol_type = other DNA
aggcaagtgcctctagcacacg

SEQ ID NO: 8166 - DNA, 22 bp, synthetic construct
  misc_feature 1..22: note = Synthetic construct
  source 1..22: mol_type = other DNA
ggcaagtgcctctagcacacgg

SEQ ID NO: 8167 - DNA, 22 bp, synthetic construct
  misc_feature 1..22: note = Synthetic construct
  source 1..22: mol_type = other DNA
gcaagtgcctctagcacacggg

SEQ ID NO: 8168 - DNA, 22 bp, synthetic construct
  misc_feature 1..22: note = Synthetic construct
  source 1..22: mol_type = other DNA
caagtgcctctagcacacgggg

SEQ ID NO: 8169 - DNA, 22 bp, synthetic construct
  misc_feature 1..22: note = Synthetic construct
  source 1..22: mol_type = other DNA
aagtgcctctagcacacggggt

SEQ ID NO: 8170 - DNA, 22 bp, synthetic construct
  misc_feature 1..22: note = Synthetic construct
  source 1..22: mol_type = other DNA
agtgcctctagcacacggggtg

SEQ ID NO: 8171 - DNA, 22 bp, synthetic construct
  misc_feature 1..22: note = Synthetic construct
  source 1..22: mol_type = other DNA
gtgcctctagcacacggggtgc

SEQ ID NO: 8172 - DNA, 22 bp, synthetic construct
  misc_feature 1..22: note = Synthetic construct
  source 1..22: mol_type = other DNA
tgcctctagcacacggggtgca

SEQ ID NO: 8173 - DNA, 22 bp, synthetic construct
  misc_feature 1..22: note = Synthetic construct
  source 1..22: mol_type = other DNA
gcctctagcacacggggtgcaa

SEQ ID NO: 8174 - DNA, 22 bp, synthetic construct
  misc_feature 1..22: note = Synthetic construct
  source 1..22: mol_type = other DNA
cctctagcacacggggtgcaat

SEQ ID NO: 8175 - DNA, 22 bp, synthetic construct
  misc_feature 1..22: note = Synthetic construct
  source 1..22: mol_type = other DNA
ctctagcacacggggtgcaatc

SEQ ID NO: 8176 - DNA, 22 bp, synthetic construct
  misc_feature 1..22: note = Synthetic construct
  source 1..22: mol_type = other DNA
tctagcacacggggtgcaatct

SEQ ID NO: 8177 - DNA, 22 bp, synthetic construct
  misc_feature 1..22: note = Synthetic construct
  source 1..22: mol_type = other DNA
ctagcacacggggtgcaatctc

SEQ ID NO: 8178 - DNA, 22 bp, synthetic construct
  misc_feature 1..22: note = Synthetic construct
  source 1..22: mol_type = other DNA
tagcacacggggtgcaatctca

SEQ ID NO: 8179 - DNA, 22 bp, synthetic construct
  misc_feature 1..22: note = Synthetic construct
  source 1..22: mol_type = other DNA
agcacacggggtgcaatctcac

SEQ ID NO: 8180 - DNA, 22 bp, synthetic construct
  misc_feature 1..22: note = Synthetic construct
  source 1..22: mol_type = other DNA
gcacacggggtgcaatctcact

SEQ ID NO: 8181 - DNA, 22 bp, synthetic construct
  misc_feature 1..22: note = Synthetic construct
  source 1..22: mol_type = other DNA
cacacggggtgcaatctcactg

SEQ ID NO: 8182 - DNA, 22 bp, synthetic construct
  misc_feature 1..22: note = Synthetic construct
  source 1..22: mol_type = other DNA
acacggggtgcaatctcactgg

SEQ ID NO: 8183 - DNA, 22 bp, synthetic construct
  misc_feature 1..22: note = Synthetic construct
  source 1..22: mol_type = other DNA
cacggggtgcaatctcactggg

SEQ ID NO: 8184 - DNA, 22 bp, synthetic construct
  misc_feature 1..22: note = Synthetic construct
  source 1..22: mol_type = other DNA
acggggtgcaatctcactggga

SEQ ID NO: 8185 - DNA, 22 bp, synthetic construct
  misc_feature 1..22: note = Synthetic construct
  source 1..22: mol_type = other DNA
cggggtgcaatctcactgggac

SEQ ID NO: 8186 - DNA, 22 bp, synthetic construct
  misc_feature 1..22: note = Synthetic construct
  source 1..22: mol_type = other DNA
ggggtgcaatctcactgggaca

SEQ ID NO: 8187 - DNA, 22 bp, synthetic construct
  misc_feature 1..22: note = Synthetic construct
  source 1..22: mol_type = other DNA
gggtgcaatctcactgggacat

SEQ ID NO: 8188 - DNA, 22 bp, synthetic construct
  misc_feature 1..22: note = Synthetic construct
  source 1..22: mol_type = other DNA
ggtgcaatctcactgggacata

SEQ ID NO: 8189 - DNA, 22 bp, synthetic construct
  misc_feature 1..22: note = Synthetic construct
  source 1..22: mol_type = other DNA
gtgcaatctcactgggacatat

SEQ ID NO: 8190 - DNA, 22 bp, synthetic construct
  misc_feature 1..22: note = Synthetic construct
  source 1..22: mol_type = other DNA
tgcaatctcactgggacatata

SEQ ID NO: 8191 - DNA, 22 bp, synthetic construct
  misc_feature 1..22: note = Synthetic construct
  source 1..22: mol_type = other DNA
gcaatctcactgggacatataa

SEQ ID NO: 8192 - DNA, 22 bp, synthetic construct
  misc_feature 1..22: note = Synthetic construct
  source 1..22: mol_type = other DNA
caatctcactgggacatataat

SEQ ID NO: 8193 - DNA, 22 bp, synthetic construct
  misc_feature 1..22: note = Synthetic construct
  source 1..22: mol_type = other DNA
aatctcactgggacatataata

SEQ ID NO: 8194 - DNA, 22 bp, synthetic construct
  misc_feature 1..22: note = Synthetic construct
  source 1..22: mol_type = other DNA
atctcactgggacatataatat

SEQ ID NO: 8195 - DNA, 22 bp, synthetic construct
  misc_feature 1..22: note = Synthetic construct
  source 1..22: mol_type = other DNA
tctcactgggacatataatatc

SEQ ID NO: 8196 - DNA, 22 bp, synthetic construct
  misc_feature 1..22: note = Synthetic construct
  source 1..22: mol_type = other DNA
ctcactgggacatataatatcg

SEQ ID NO: 8197 - DNA, 22 bp, synthetic construct
  misc_feature 1..22: note = Synthetic construct
  source 1..22: mol_type = other DNA
tcactgggacatataatatcgt

SEQ ID NO: 8198 - DNA, 22 bp, synthetic construct
  misc_feature 1..22: note = Synthetic construct
  source 1..22: mol_type = other DNA
cactgggacatataatatcgtc

SEQ ID NO: 8199 - DNA, 22 bp, synthetic construct
  misc_feature 1..22: note = Synthetic construct
  source 1..22: mol_type = other DNA
actgggacatataatatcgtcc

SEQ ID NO: 8200 - DNA, 22 bp, synthetic construct
  misc_feature 1..22: note = Synthetic construct
  source 1..22: mol_type = other DNA
ctgggacatataatatcgtccc

SEQ ID NO: 8201 - DNA, 22 bp, synthetic construct
  misc_feature 1..22: note = Synthetic construct
  source 1..22: mol_type = other DNA
tgggacatataatatcgtcccc

SEQ ID NO: 8202 - DNA, 22 bp, synthetic construct
  misc_feature 1..22: note = Synthetic construct
  source 1..22: mol_type = other DNA
gggacatataatatcgtccccg

SEQ ID NO: 8203 - DNA, 22 bp, synthetic construct
  misc_feature 1..22: note = Synthetic construct
  source 1..22: mol_type = other DNA
ggacatataatatcgtccccgt

SEQ ID NO: 8204 - DNA, 22 bp, synthetic construct
  misc_feature 1..22: note = Synthetic construct
  source 1..22: mol_type = other DNA
gacatataatatcgtccccgta

SEQ ID NO: 8205 - DNA, 22 bp, synthetic construct
  misc_feature 1..22: note = Synthetic construct
  source 1..22: mol_type = other DNA
acatataatatcgtccccgtag

SEQ ID NO: 8206 - DNA, 22 bp, synthetic construct
  misc_feature 1..22: note = Synthetic construct
  source 1..22: mol_type = other DNA
catataatatcgtccccgtaga

SEQ ID NO: 8207 - DNA, 22 bp, synthetic construct
  misc_feature 1..22: note = Synthetic construct
  source 1..22: mol_type = other DNA
atataatatcgtccccgtagat

SEQ ID NO: 8208 - DNA, 22 bp, synthetic construct
  misc_feature 1..22: note = Synthetic construct
  source 1..22: mol_type = other DNA
tataatatcgtccccgtagatg

SEQ ID NO: 8209 - DNA, 22 bp, synthetic construct
  misc_feature 1..22: note = Synthetic construct
  source 1..22: mol_type = other DNA
ataatatcgtccccgtagatgc

SEQ ID NO: 8210 - DNA, 22 bp, synthetic construct
  misc_feature 1..22: note = Synthetic construct
  source 1..22: mol_type = other DNA
taatatcgtccccgtagatgcc

SEQ ID NO: 8211 - DNA, 22 bp, synthetic construct
  misc_feature 1..22: note = Synthetic construct
  source 1..22: mol_type = other DNA
aatatcgtccccgtagatgcct

SEQ ID NO: 8212 - DNA, 22 bp, synthetic construct
  misc_feature 1..22: note = Synthetic construct
  source 1..22: mol_type = other DNA
atatcgtccccgtagatgccta

SEQ ID NO: 8213 - DNA, 22 bp, synthetic construct
  misc_feature 1..22: note = Synthetic construct
  source 1..22: mol_type = other DNA
tatcgtccccgtagatgcctat

SEQ ID NO: 8214 - DNA, 22 bp, synthetic construct
  misc_feature 1..22: note = Synthetic construct
  source 1..22: mol_type = other DNA
atcgtccccgtagatgcctatg

SEQ ID NO: 8215 - DNA, 22 bp, synthetic construct
  misc_feature 1..22: note = Synthetic construct
  source 1..22: mol_type = other DNA
tcgtccccgtagatgcctatgg

SEQ ID NO: 8216 - DNA, 22 bp, synthetic construct
  misc_feature 1..22: note = Synthetic construct
  source 1..22: mol_type = other DNA
cgtccccgtagatgcctatggt

SEQ ID NO: 8217 - DNA, 22 bp, synthetic construct
  misc_feature 1..22: note = Synthetic construct
  source 1..22: mol_type = other DNA
gtccccgtagatgcctatggtt

SEQ ID NO: 8218 - DNA, 22 bp, synthetic construct
  misc_feature 1..22: note = Synthetic construct
  source 1..22: mol_type = other DNA
tccccgtagatgcctatggttc

SEQ ID NO: 8219 - DNA, 22 bp, synthetic construct
  misc_feature 1..22: note = Synthetic construct
  source 1..22: mol_type = other DNA
ccccgtagatgcctatggttcc

SEQ ID NO: 8220 - DNA, 22 bp, synthetic construct
  misc_feature 1..22: note = Synthetic construct
  source 1..22: mol_type = other DNA
cccgtagatgcctatggttccg

SEQ ID NO: 8221 - DNA, 22 bp, synthetic construct
  misc_feature 1..22: note = Synthetic construct
  source 1..22: mol_type = other DNA
ccgtagatgcctatggttccgg

SEQ ID NO: 8222 - DNA, 22 bp, synthetic construct
  misc_feature 1..22: note = Synthetic construct
  source 1..22: mol_type = other DNA
cgtagatgcctatggttccggc

SEQ ID NO: 8223 - DNA, 22 bp, synthetic construct
  misc_feature 1..22: note = Synthetic construct
  source 1..22: mol_type = other DNA
gtagatgcctatggttccggcg

SEQ ID NO: 8224 - DNA, 22 bp, synthetic construct
  misc_feature 1..22: note = Synthetic construct
  source 1..22: mol_type = other DNA
tagatgcctatggttccggcgt

SEQ ID NO: 8225 - DNA, 22 bp, synthetic construct
  misc_feature 1..22: note = Synthetic construct
  source 1..22: mol_type = other DNA
agatgcctatggttccggcgtt

SEQ ID NO: 8226 - DNA, 22 bp, synthetic construct
  misc_feature 1..22: note = Synthetic construct
  source 1..22: mol_type = other DNA
gatgcctatggttccggcgtta

SEQ ID NO: 8227 - DNA, 22 bp, synthetic construct
  misc_feature 1..22: note = Synthetic construct
  source 1..22: mol_type = other DNA
atgcctatggttccggcgttac

SEQ ID NO: 8228 - DNA, 22 bp, synthetic construct
  misc_feature 1..22: note = Synthetic construct
  source 1..22: mol_type = other DNA
tgcctatggttccggcgttacc

SEQ ID NO: 8229 - DNA, 22 bp, synthetic construct
  misc_feature 1..22: note = Synthetic construct
  source 1..22: mol_type = other DNA
gcctatggttccggcgttacca

SEQ ID NO: 8230 - DNA, 22 bp, synthetic construct
  misc_feature 1..22: note = Synthetic construct
  source 1..22: mol_type = other DNA
cctatggttccggcgttaccaa

SEQ ID NO: 8231 - DNA, 22 bp, synthetic construct
  misc_feature 1..22: note = Synthetic construct
  source 1..22: mol_type = other DNA
ctatggttccggcgttaccaaa

SEQ ID NO: 8232 - DNA, 22 bp, synthetic construct
  misc_feature 1..22: note = Synthetic construct
  source 1..22: mol_type = other DNA
tatggttccggcgttaccaaaa

SEQ ID NO: 8233 - DNA, 22 bp, synthetic construct
  misc_feature 1..22: note = Synthetic construct
  source 1..22: mol_type = other DNA
atggttccggcgttaccaaaat

SEQ ID NO: 8234 - DNA, 22 bp, synthetic construct
  misc_feature 1..22: note = Synthetic construct
  source 1..22: mol_type = other DNA
tggttccggcgttaccaaaatg

SEQ ID NO: 8235 - DNA, 22 bp, synthetic construct
  misc_feature 1..22: note = Synthetic construct
  source 1..22: mol_type = other DNA
ggttccggcgttaccaaaatgg

SEQ ID NO: 8236 - DNA, 22 bp, synthetic construct
  misc_feature 1..22: note = Synthetic construct
  source 1..22: mol_type = other DNA
gttccggcgttaccaaaatgga

SEQ ID NO: 8237 - DNA, 22 bp, synthetic construct
  misc_feature 1..22: note = Synthetic construct
  source 1..22: mol_type = other DNA
ttccggcgttaccaaaatggat

SEQ ID NO: 8238 - DNA, 22 bp, synthetic construct
  misc_feature 1..22: note = Synthetic construct
  source 1..22: mol_type = other DNA
tccggcgttaccaaaatggatt

SEQ ID NO: 8239 - DNA, 22 bp, synthetic construct
  misc_feature 1..22: note = Synthetic construct
  source 1..22: mol_type = other DNA
ccggcgttaccaaaatggattt

SEQ ID NO: 8240 - DNA, 22 bp, synthetic construct
  misc_feature 1..22: note = Synthetic construct
  source 1..22: mol_type = other DNA
cggcgttaccaaaatggatttg

SEQ ID NO: 8241 - DNA, 22 bp, synthetic construct
  misc_feature 1..22: note = Synthetic construct
  source 1..22: mol_type = other DNA
ggcgttaccaaaatggatttgg

SEQ ID NO: 8242 - DNA, 22 bp, synthetic construct
  misc_feature 1..22: note = Synthetic construct
  source 1..22: mol_type = other DNA
gcgttaccaaaatggatttggg

SEQ ID NO: 8243 - DNA, 22 bp, synthetic construct
  misc_feature 1..22: note = Synthetic construct
  source 1..22: mol_type = other DNA
cgttaccaaaatggatttgggt

SEQ ID NO: 8244 - DNA, 22 bp, synthetic construct
  misc_feature 1..22: note = Synthetic construct
  source 1..22: mol_type = other DNA
gttaccaaaatggatttgggtc

SEQ ID NO: 8245 - DNA, 22 bp, synthetic construct
  misc_feature 1..22: note = Synthetic construct
  source 1..22: mol_type = other DNA
ttaccaaaatggatttgggtcg

SEQ ID NO: 8246 - DNA, 22 bp, synthetic construct
  misc_feature 1..22: note = Synthetic construct
  source 1..22: mol_type = other DNA
taccaaaatggatttgggtcgc

SEQ ID NO: 8247 - DNA, 22 bp, synthetic construct
  misc_feature 1..22: note = Synthetic construct
  source 1..22: mol_type = other DNA
accaaaatggatttgggtcgct

SEQ ID NO: 8248 - DNA, 22 bp, synthetic construct
  misc_feature 1..22: note = Synthetic construct
  source 1..22: mol_type = other DNA
ccaaaatggatttgggtcgctt

SEQ ID NO: 8249 - DNA, 22 bp, synthetic construct
  misc_feature 1..22: note = Synthetic construct
  source 1..22: mol_type = other DNA
caaaatggatttgggtcgcttt

SEQ ID NO: 8250 - DNA, 22 bp, synthetic construct
  misc_feature 1..22: note = Synthetic construct
  source 1..22: mol_type = other DNA
aaaatggatttgggtcgctttg

SEQ ID NO: 8251 - DNA, 22 bp, synthetic construct
  misc_feature 1..22: note = Synthetic construct
  source 1..22: mol_type = other DNA
aaatggatttgggtcgctttga

SEQ ID NO: 8252 - DNA, 22 bp, synthetic construct
  misc_feature 1..22: note = Synthetic construct
  source 1..22: mol_type = other DNA
aatggatttgggtcgctttgac

SEQ ID NO: 8253 - DNA, 22 bp, synthetic construct
  misc_feature 1..22: note = Synthetic construct
  source 1..22: mol_type = other DNA
atggatttgggtcgctttgact

SEQ ID NO: 8254 - DNA, 22 bp, synthetic construct
  misc_feature 1..22: note = Synthetic construct
  source 1..22: mol_type = other DNA
tggatttgggtcgctttgacta

SEQ ID NO: 8255 - DNA, 22 bp, synthetic construct
  misc_feature 1..22: note = Synthetic construct
  source 1..22: mol_type = other DNA
ggatttgggtcgctttgactat

SEQ ID NO: 8256 - DNA, 22 bp, synthetic construct
  misc_feature 1..22: note = Synthetic construct
  source 1..22: mol_type = other DNA
gatttgggtcgctttgactatt

SEQ ID NO: 8257 - DNA, 22 bp, synthetic construct
  misc_feature 1..22: note = Synthetic construct
  source 1..22: mol_type = other DNA
atttgggtcgctttgactattg

SEQ ID NO: 8258 - DNA, 22 bp, synthetic construct
  misc_feature 1..22: note = Synthetic construct
  source 1..22: mol_type = other DNA
tttgggtcgctttgactattgc

SEQ ID NO: 8259 - DNA, 22 bp, synthetic construct
  misc_feature 1..22: note = Synthetic construct
  source 1..22: mol_type = other DNA
ttgggtcgctttgactattgcc

SEQ ID NO: 8260 - DNA, 22 bp, synthetic construct
  misc_feature 1..22: note = Synthetic construct
  source 1..22: mol_type = other DNA
tgggtcgctttgactattgccc

SEQ ID NO: 8261 - DNA, 22 bp, synthetic construct
  misc_feature 1..22: note = Synthetic construct
  source 1..22: mol_type = other DNA
gggtcgctttgactattgccca

SEQ ID NO: 8262 - DNA, 22 bp, synthetic construct
  misc_feature 1..22: note = Synthetic construct
  source 1..22: mol_type = other DNA
ggtcgctttgactattgcccag

SEQ ID NO: 8263 - DNA, 22 bp, synthetic construct
  misc_feature 1..22: note = Synthetic construct
  source 1..22: mol_type = other DNA
gtcgctttgactattgcccaga

SEQ ID NO: 8264 - DNA, 22 bp, synthetic construct
  misc_feature 1..22: note = Synthetic construct
  source 1..22: mol_type = other DNA
tcgctttgactattgcccagaa

SEQ ID NO: 8265 - DNA, 22 bp, synthetic construct
  misc_feature 1..22: note = Synthetic construct
  source 1..22: mol_type = other DNA
cgctttgactattgcccagaat

SEQ ID NO: 8266 - DNA, 22 bp, synthetic construct
  misc_feature 1..22: note = Synthetic construct
  source 1..22: mol_type = other DNA
gctttgactattgcccagaata

SEQ ID NO: 8267 - DNA, 22 bp, synthetic construct
  misc_feature 1..22: note = Synthetic construct
  source 1..22: mol_type = other DNA
ctttgactattgcccagaatat

SEQ ID NO: 8268 - DNA, 22 bp, synthetic construct
  misc_feature 1..22: note = Synthetic construct
  source 1..22: mol_type = other DNA
tttgactattgcccagaatatc

SEQ ID NO: 8269 - DNA, 22 bp, synthetic construct
  misc_feature 1..22: note = Synthetic construct
  source 1..22: mol_type = other DNA
ttgactattgcccagaatatca

SEQ ID NO: 8270 - DNA, 22 bp, synthetic construct
  misc_feature 1..22: note = Synthetic construct
  source 1..22: mol_type = other DNA
tgactattgcccagaatatcat

SEQ ID NO: 8271 - DNA, 22 bp, synthetic construct
  misc_feature 1..22: note = Synthetic construct
  source 1..22: mol_type = other DNA
gactattgcccagaatatcatg

SEQ ID NO: 8272 - DNA, 22 bp, synthetic construct
  misc_feature 1..22: note = Synthetic construct
  source 1..22: mol_type = other DNA
actattgcccagaatatcatgg

SEQ ID NO: 8273 - DNA, 22 bp, synthetic construct
  misc_feature 1..22: note = Synthetic construct
  source 1..22: mol_type = other DNA
ctattgcccagaatatcatgga

SEQ ID NO: 8274 - DNA, 22 bp, synthetic construct
  misc_feature 1..22: note = Synthetic construct
  source 1..22: mol_type = other DNA
tattgcccagaatatcatggac

SEQ ID NO: 8275 - DNA, 22 bp, synthetic construct
  misc_feature 1..22: note = Synthetic construct
  source 1..22: mol_type = other DNA
attgcccagaatatcatggact

SEQ ID NO: 8276 - DNA, 22 bp, synthetic construct
  misc_feature 1..22: note = Synthetic construct
  source 1..22: mol_type = other DNA
ttgcccagaatatcatggactc

SEQ ID NO: 8277 - DNA, 22 bp, synthetic construct
  misc_feature 1..22: note = Synthetic construct
  source 1..22: mol_type = other DNA
tgcccagaatatcatggactct

SEQ ID NO: 8278 - DNA, 22 bp, synthetic construct
  misc_feature 1..22: note = Synthetic construct
  source 1..22: mol_type = other DNA
gcccagaatatcatggactcta

SEQ ID NO: 8279 - DNA, 22 bp, synthetic construct
  misc_feature 1..22: note = Synthetic construct
  source 1..22: mol_type = other DNA
cccagaatatcatggactctag

SEQ ID NO: 8280 - DNA, 22 bp, synthetic construct
  misc_feature 1..22: note = Synthetic construct
  source 1..22: mol_type = other DNA
ccagaatatcatggactctagc

SEQ ID NO: 8281 - DNA, 22 bp, synthetic construct
  misc_feature 1..22: note = Synthetic construct
  source 1..22: mol_type = other DNA
cagaatatcatggactctagct

SEQ ID NO: 8282 - DNA, 22 bp, synthetic construct
  misc_feature 1..22: note = Synthetic construct
  source 1..22: mol_type = other DNA
agaatatcatggactctagctc

SEQ ID NO: 8283 - DNA, 22 bp, synthetic construct
  misc_feature 1..22: note = Synthetic construct
  source 1..22: mol_type = other DNA
gaatatcatggactctagctca

SEQ ID NO: 8284 - DNA, 22 bp, synthetic construct
  misc_feature 1..22: note = Synthetic construct
  source 1..22: mol_type = other DNA
aatatcatggactctagctcaa

SEQ ID NO: 8285 - DNA, 22 bp, synthetic construct
  misc_feature 1..22: note = Synthetic construct
  source 1..22: mol_type = other DNA
atatcatggactctagctcaaa

SEQ ID NO: 8286 - DNA, 22 bp, synthetic construct
  misc_feature 1..22: note = Synthetic construct
  source 1..22: mol_type = other DNA
tatcatggactctagctcaaat

SEQ ID NO: 8287 - DNA, 22 bp, synthetic construct
  misc_feature 1..22: note = Synthetic construct
  source 1..22: mol_type = other DNA
atcatggactctagctcaaatg

SEQ ID NO: 8288 - DNA, 22 bp, synthetic construct
  misc_feature 1..22: note = Synthetic construct
  source 1..22: mol_type = other DNA
tcatggactctagctcaaatgt

SEQ ID NO: 8289 - DNA, 22 bp, synthetic construct
  misc_feature 1..22: note = Synthetic construct
  source 1..22: mol_type = other DNA
catggactctagctcaaatgtg

SEQ ID NO: 8290 - DNA, 22 bp, synthetic construct
  misc_feature 1..22: note = Synthetic construct
  source 1..22: mol_type = other DNA
atggactctagctcaaatgtga

SEQ ID NO: 8291 - DNA, 22 bp, synthetic construct
  misc_feature 1..22: note = Synthetic construct
  source 1..22: mol_type = other DNA
tggactctagctcaaatgtgaa

SEQ ID NO: 8292 - DNA, 22 bp, synthetic construct
  misc_feature 1..22: note = Synthetic construct
  source 1..22: mol_type = other DNA
ggactctagctcaaatgtgaac

SEQ ID NO: 8293 - DNA, 22 bp, synthetic construct
  misc_feature 1..22: note = Synthetic construct
  source 1..22: mol_type = other DNA
gactctagctcaaatgtgaacc

SEQ ID NO: 8294 - DNA, 22 bp, synthetic construct
  misc_feature 1..22: note = Synthetic construct
  source 1..22: mol_type = other DNA
actctagctcaaatgtgaaccc

SEQ ID NO: 8295 - DNA, 22 bp, synthetic construct
  misc_feature 1..22: note = Synthetic construct
  source 1..22: mol_type = other DNA
ctctagctcaaatgtgaaccca

SEQ ID NO: 8296 - DNA, 22 bp, synthetic construct
  misc_feature 1..22: note = Synthetic construct
  source 1..22: mol_type = other DNA
tctagctcaaatgtgaacccat

SEQ ID NO: 8297 - DNA, 22 bp, synthetic construct
  misc_feature 1..22: note = Synthetic construct
  source 1..22: mol_type = other DNA
ctagctcaaatgtgaacccatt

SEQ ID NO: 8298 - DNA, 22 bp, synthetic construct
  misc_feature 1..22: note = Synthetic construct
  source 1..22: mol_type = other DNA
tagctcaaatgtgaacccattt

SEQ ID NO: 8299 - DNA, 22 bp, synthetic construct
  misc_feature 1..22: note = Synthetic construct
  source 1..22: mol_type = other DNA
agctcaaatgtgaacccatttc

SEQ ID NO: 8300 - DNA, 22 bp, synthetic construct
  misc_feature 1..22: note = Synthetic construct
  source 1..22: mol_type = other DNA
gctcaaatgtgaacccatttcc

SEQ ID NO: 8301 - DNA, 22 bp, synthetic construct
  misc_feature 1..22: note = Synthetic construct
  source 1..22: mol_type = other DNA
ctcaaatgtgaacccatttccc

SEQ ID NO: 8302 - DNA, 22 bp, synthetic construct
  misc_feature 1..22: note = Synthetic construct
  source 1..22: mol_type = other DNA
tcaaatgtgaacccatttccca

SEQ ID NO: 8303 - DNA, 22 bp, synthetic construct
  misc_feature 1..22: note = Synthetic construct
  source 1..22: mol_type = other DNA
caaatgtgaacccatttcccat

SEQ ID NO: 8304 - DNA, 22 bp, synthetic construct
  misc_feature 1..22: note = Synthetic construct
  source 1..22: mol_type = other DNA
aaatgtgaacccatttcccatt

SEQ ID NO: 8305 - DNA, 22 bp, synthetic construct
  misc_feature 1..22: note = Synthetic construct
  source 1..22: mol_type = other DNA
aatgtgaacccatttcccattg

SEQ ID NO: 8306 - DNA, 22 bp, synthetic construct
  misc_feature 1..22: note = Synthetic construct
  source 1..22: mol_type = other DNA
atgtgaacccatttcccattgt

SEQ ID NO: 8307 - DNA, 22 bp, synthetic construct
  misc_feature 1..22: note = Synthetic construct
  source 1..22: mol_type = other DNA
tgtgaacccatttcccattgtg

SEQ ID NO: 8308 - DNA, 22 bp, synthetic construct
  misc_feature 1..22: note = Synthetic construct
  source 1..22: mol_type = other DNA
gtgaacccatttcccattgtgg

SEQ ID NO: 8309 - DNA, 22 bp, synthetic construct
  misc_feature 1..22: note = Synthetic construct
  source 1..22: mol_type = other DNA
tgaacccatttcccattgtgga

SEQ ID NO: 8310 - DNA, 22 bp, synthetic construct
  misc_feature 1..22: note = Synthetic construct
  source 1..22: mol_type = other DNA
gaacccatttcccattgtggaa

SEQ ID NO: 8311 - DNA, 22 bp, synthetic construct
  misc_feature 1..22: note = Synthetic construct
  source 1..22: mol_type = other DNA
aacccatttcccattgtggaaa

SEQ ID NO: 8312 - DNA, 22 bp, synthetic construct
  misc_feature 1..22: note = Synthetic construct
  source 1..22: mol_type = other DNA
acccatttcccattgtggaaaa

SEQ ID NO: 8313 - DNA, 22 bp, synthetic construct
  misc_feature 1..22: note = Synthetic construct
  source 1..22: mol_type = other DNA
cccatttcccattgtggaaaat

SEQ ID NO: 8314 - DNA, 22 bp, synthetic construct
  misc_feature 1..22: note = Synthetic construct
  source 1..22: mol_type = other DNA
ccatttcccattgtggaaaata

SEQ ID NO: 8315 - DNA, 22 bp, synthetic construct
  misc_feature 1..22: note = Synthetic construct
  source 1..22: mol_type = other DNA
catttcccattgtggaaaatag

SEQ ID NO: 8316 - DNA, 22 bp, synthetic construct
  misc_feature 1..22: note = Synthetic construct
  source 1..22: mol_type = other DNA
atttcccattgtggaaaatagt

SEQ ID NO: 8317 - DNA, 22 bp, synthetic construct
  misc_feature 1..22: note = Synthetic construct
  source 1..22: mol_type = other DNA
tttcccattgtggaaaatagtt

SEQ ID NO: 8318 - DNA, 22 bp, synthetic construct
  misc_feature 1..22: note = Synthetic construct
  source 1..22: mol_type = other DNA
ttcccattgtggaaaatagttc

SEQ ID NO: 8319 - DNA, 22 bp, synthetic construct
  misc_feature 1..22: note = Synthetic construct
  source 1..22: mol_type = other DNA
tcccattgtggaaaatagttcc

SEQ ID NO: 8320 - DNA, 22 bp, synthetic construct
  misc_feature 1..22: note = Synthetic construct
  source 1..22: mol_type = other DNA
cccattgtggaaaatagttccc

SEQ ID NO: 8321 - DNA, 22 bp, synthetic construct
  misc_feature 1..22: note = Synthetic construct
  source 1..22: mol_type = other DNA
ccattgtggaaaatagttccca

SEQ ID NO: 8322 - DNA, 22 bp, synthetic construct
  misc_feature 1..22: note = Synthetic construct
  source 1..22: mol_type = other DNA
cattgtggaaaatagttcccat

SEQ ID NO: 8323 - DNA, 22 bp, synthetic construct
  misc_feature 1..22: note = Synthetic construct
  source 1..22: mol_type = other DNA
attgtggaaaatagttcccatc

SEQ ID NO: 8324 - DNA, 22 bp, synthetic construct
  misc_feature 1..22: note = Synthetic construct
  source 1..22: mol_type = other DNA
ttgtggaaaatagttcccatcg

SEQ ID NO: 8325 - DNA, 22 bp, synthetic construct
  misc_feature 1..22: note = Synthetic construct
  source 1..22: mol_type = other DNA
tgtggaaaatagttcccatcgt

SEQ ID NO: 8326 - DNA, 22 bp, synthetic construct
  misc_feature 1..22: note = Synthetic construct
  source 1..22: mol_type = other DNA
gtggaaaatagttcccatcgta

SEQ ID NO: 8327 - DNA, 22 bp, synthetic construct
  misc_feature 1..22: note = Synthetic construct
  source 1..22: mol_type = other DNA
tggaaaatagttcccatcgtat

SEQ ID NO: 8328 - DNA, 22 bp, synthetic construct
  misc_feature 1..22: note = Synthetic construct
  source 1..22: mol_type = other DNA
ggaaaatagttcccatcgtatc

SEQ ID NO: 8329 - DNA, 22 bp, synthetic construct
  misc_feature 1..22: note = Synthetic construct
  source 1..22: mol_type = other DNA
gaaaatagttcccatcgtatcg

SEQ ID NO: 8330 - DNA, 22 bp, synthetic construct
  misc_feature 1..22: note = Synthetic construct
  source 1..22: mol_type = other DNA
aaaatagttcccatcgtatcgt

SEQ ID NO: 8331 - DNA, 22 bp, synthetic construct
  misc_feature 1..22: note = Synthetic construct
  source 1..22: mol_type = other DNA
aaatagttcccatcgtatcgtc

SEQ ID NO: 8332 - DNA, 22 bp, synthetic construct
  misc_feature 1..22: note = Synthetic construct
  source 1..22: mol_type = other DNA
aatagttcccatcgtatcgtct

SEQ ID NO: 8333 - DNA, 22 bp, synthetic construct
  misc_feature 1..22: note = Synthetic construct
  source 1..22: mol_type = other DNA
atagttcccatcgtatcgtctc

SEQ ID NO: 8334 - DNA, 22 bp, synthetic construct
  misc_feature 1..22: note = Synthetic construct
  source 1..22: mol_type = other DNA
tagttcccatcgtatcgtctcg

SEQ ID NO: 8335 - DNA, 22 bp, synthetic construct
  misc_feature 1..22: note = Synthetic construct
  source 1..22: mol_type = other DNA
agttcccatcgtatcgtctcgc

SEQ ID NO: 8336 - DNA, 22 bp, synthetic construct
  misc_feature 1..22: note = Synthetic construct
  source 1..22: mol_type = other DNA
gttcccatcgtatcgtctcgcc

SEQ ID NO: 8337 - DNA, 22 bp, synthetic construct
  misc_feature 1..22: note = Synthetic construct
  source 1..22: mol_type = other DNA
ttcccatcgtatcgtctcgcca

SEQ ID NO: 8338 - DNA, 22 bp, synthetic construct
  misc_feature 1..22: note = Synthetic construct
  source 1..22: mol_type = other DNA
tcccatcgtatcgtctcgccat

SEQ ID NO: 8339 - DNA, 22 bp, synthetic construct
  misc_feature 1..22: note = Synthetic construct
  source 1..22: mol_type = other DNA
cccatcgtatcgtctcgccatc

SEQ ID NO: 8340 - DNA, 22 bp, synthetic construct
  misc_feature 1..22: note = Synthetic construct
  source 1..22: mol_type = other DNA
ccatcgtatcgtctcgccatct

SEQ ID NO: 8341 - DNA, 22 bp, synthetic construct
  misc_feature 1..22: note = Synthetic construct
  source 1..22: mol_type = other DNA
catcgtatcgtctcgccatcta

SEQ ID NO: 8342 - DNA, 22 bp, synthetic construct
  misc_feature 1..22: note = Synthetic construct
  source 1..22: mol_type = other DNA
atcgtatcgtctcgccatctac

SEQ ID NO: 8343 - DNA, 22 bp, synthetic construct
  misc_feature 1..22: note = Synthetic construct
  source 1..22: mol_type = other DNA
tcgtatcgtctcgccatctacg

SEQ ID NO: 8344 - DNA, 22 bp, synthetic construct
  misc_feature 1..22: note = Synthetic construct
  source 1..22: mol_type = other DNA
cgtatcgtctcgccatctacga

SEQ ID NO: 8345 - DNA, 22 bp, synthetic construct
  misc_feature 1..22: note = Synthetic construct
  source 1..22: mol_type = other DNA
gtatcgtctcgccatctacgat

SEQ ID NO: 8346 - DNA, 22 bp, synthetic construct
  misc_feature 1..22: note = Synthetic construct
  source 1..22: mol_type = other DNA
tatcgtctcgccatctacgatt

SEQ ID NO: 8347 - DNA, 22 bp, synthetic construct
  misc_feature 1..22: note = Synthetic construct
  source 1..22: mol_type = other DNA
atcgtctcgccatctacgattc

SEQ ID NO: 8348 - DNA, 22 bp, synthetic construct
  misc_feature 1..22: note = Synthetic construct
  source 1..22: mol_type = other DNA
tcgtctcgccatctacgattcc

SEQ ID NO: 8349 - DNA, 22 bp, synthetic construct
  misc_feature 1..22: note = Synthetic construct
  source 1..22: mol_type = other DNA
cgtctcgccatctacgattccg

SEQ ID NO: 8350 - DNA, 22 bp, synthetic construct
  misc_feature 1..22: note = Synthetic construct
  source 1..22: mol_type = other DNA
gtctcgccatctacgattccgt

SEQ ID NO: 8351 - DNA, 22 bp, synthetic construct
  misc_feature 1..22: note = Synthetic construct
  source 1..22: mol_type = other DNA
tctcgccatctacgattccgta

SEQ ID NO: 8352 - DNA, 22 bp, synthetic construct
  misc_feature 1..22: note = Synthetic construct
  source 1..22: mol_type = other DNA
ctcgccatctacgattccgtag

SEQ ID NO: 8353 - DNA, 22 bp, synthetic construct
  misc_feature 1..22: note = Synthetic construct
  source 1..22: mol_type = other DNA
tcgccatctacgattccgtagt

SEQ ID NO: 8354 - DNA, 22 bp, synthetic construct
  misc_feature 1..22: note = Synthetic construct
  source 1..22: mol_type = other DNA
cgccatctacgattccgtagtg

SEQ ID NO: 8355 - DNA, 22 bp, synthetic construct
  misc_feature 1..22: note = Synthetic construct
  source 1..22: mol_type = other DNA
gccatctacgattccgtagtgt

SEQ ID NO: 8356 - DNA, 22 bp, synthetic construct
  misc_feature 1..22: note = Synthetic construct
  source 1..22: mol_type = other DNA
ccatctacgattccgtagtgtg

SEQ ID NO: 8357 - DNA, 22 bp, synthetic construct
  misc_feature 1..22: note = Synthetic construct
  source 1..22: mol_type = other DNA
catctacgattccgtagtgtga

SEQ ID NO: 8358 - DNA, 22 bp, synthetic construct
  misc_feature 1..22: note = Synthetic construct
  source 1..22: mol_type = other DNA
atctacgattccgtagtgtgag

SEQ ID NO: 8359 - DNA, 22 bp, synthetic construct
  misc_feature 1..22: note = Synthetic construct
  source 1..22: mol_type = other DNA
tctacgattccgtagtgtgagc

SEQ ID NO: 8360 - DNA, 22 bp, synthetic construct
  misc_feature 1..22: note = Synthetic construct
  source 1..22: mol_type = other DNA
ctacgattccgtagtgtgagcg

SEQ ID NO: 8361 - DNA, 22 bp, synthetic construct
  misc_feature 1..22: note = Synthetic construct
  source 1..22: mol_type = other DNA
tacgattccgtagtgtgagcgg

SEQ ID NO: 8362 - DNA, 22 bp, synthetic construct
  misc_feature 1..22: note = Synthetic construct
  source 1..22: mol_type = other DNA
acgattccgtagtgtgagcgga

SEQ ID NO: 8363 - DNA, 22 bp, synthetic construct
  misc_feature 1..22: note = Synthetic construct
  source 1..22: mol_type = other DNA
cgattccgtagtgtgagcggat

SEQ ID NO: 8364 - DNA, 22 bp, synthetic construct
  misc_feature 1..22: note = Synthetic construct
  source 1..22: mol_type = other DNA
gattccgtagtgtgagcggata

SEQ ID NO: 8365 - DNA, 22 bp, synthetic construct
  misc_feature 1..22: note = Synthetic construct
  source 1..22: mol_type = other DNA
attccgtagtgtgagcggatac

SEQ ID NO: 8366 - DNA, 22 bp, synthetic construct
  misc_feature 1..22: note = Synthetic construct
  source 1..22: mol_type = other DNA
ttccgtagtgtgagcggatacg

SEQ ID NO: 8367 - DNA, 22 bp, synthetic construct
  misc_feature 1..22: note = Synthetic construct
  source 1..22: mol_type = other DNA
tccgtagtgtgagcggatacga

SEQ ID NO: 8368 - DNA, 22 bp, synthetic construct
  misc_feature 1..22: note = Synthetic construct
  source 1..22: mol_type = other DNA
ccgtagtgtgagcggatacgat

SEQ ID NO: 8369 - DNA, 22 bp, synthetic construct
  misc_feature 1..22: note = Synthetic construct
  source 1..22: mol_type = other DNA
cgtagtgtgagcggatacgatc

SEQ ID NO: 8370 - DNA, 22 bp, synthetic construct
  misc_feature 1..22: note = Synthetic construct
  source 1..22: mol_type = other DNA
gtagtgtgagcggatacgatcg

SEQ ID NO: 8371 - DNA, 22 bp, synthetic construct
  misc_feature 1..22: note = Synthetic construct
  source 1..22: mol_type = other DNA
tagtgtgagcggatacgatcga

SEQ ID NO: 8372 - DNA, 22 bp, synthetic construct
  misc_feature 1..22: note = Synthetic construct
  source 1..22: mol_type = other DNA
agtgtgagcggatacgatcgag

SEQ ID NO: 8373 - DNA, 22 bp, synthetic construct
  misc_feature 1..22: note = Synthetic construct
  source 1..22: mol_type = other DNA
gtgtgagcggatacgatcgaga

SEQ ID NO: 8374 - DNA, 22 bp, synthetic construct
  misc_feature 1..22: note = Synthetic construct
  source 1..22: mol_type = other DNA
tgtgagcggatacgatcgagat

SEQ ID NO: 8375 - DNA, 22 bp, synthetic construct
  misc_feature 1..22: note = Synthetic construct
  source 1..22: mol_type = other DNA
gtgagcggatacgatcgagata

SEQ ID NO: 8376 - DNA, 22 bp, synthetic construct
  misc_feature 1..22: note = Synthetic construct
  source 1..22: mol_type = other DNA
tgagcggatacgatcgagatat

SEQ ID NO: 8377 - DNA, 22 bp, synthetic construct
  misc_feature 1..22: note = Synthetic construct
  source 1..22: mol_type = other DNA
gagcggatacgatcgagatatg

SEQ ID NO: 8378 - DNA, 22 bp, synthetic construct
  misc_feature 1..22: note = Synthetic construct
  source 1..22: mol_type = other DNA
agcggatacgatcgagatatga

SEQ ID NO: 8379 - DNA, 22 bp, synthetic construct
  misc_feature 1..22: note = Synthetic construct
  source 1..22: mol_type = other DNA
gcggatacgatcgagatatgaa

SEQ ID NO: 8380 - DNA, 22 bp, synthetic construct
  misc_feature 1..22: note = Synthetic construct
  source 1..22: mol_type = other DNA
cggatacgatcgagatatgaat

SEQ ID NO: 8381 - DNA, 22 bp, synthetic construct
  misc_feature 1..22: note = Synthetic construct
  source 1..22: mol_type = other DNA
ggatacgatcgagatatgaata

SEQ ID NO: 8382 - DNA, 22 bp, synthetic construct
  misc_feature 1..22: note = Synthetic construct
  source 1..22: mol_type = other DNA
gatacgatcgagatatgaatat

SEQ ID NO: 8383 - DNA, 22 bp, synthetic construct
  misc_feature 1..22: note = Synthetic construct
  source 1..22: mol_type = other DNA
atacgatcgagatatgaatata

SEQ ID NO: 8384 - DNA, 22 bp, synthetic construct
  misc_feature 1..22: note = Synthetic construct
  source 1..22: mol_type = other DNA
tacgatcgagatatgaatatag

SEQ ID NO: 8385 - DNA, 22 bp, synthetic construct
  misc_feature 1..22: note = Synthetic construct
  source 1..22: mol_type = other DNA
acgatcgagatatgaatatagc

SEQ ID NO: 8386 - DNA, 22 bp, synthetic construct
  misc_feature 1..22: note = Synthetic construct
  source 1..22: mol_type = other DNA
cgatcgagatatgaatatagct

SEQ ID NO: 8387 - DNA, 22 bp, synthetic construct
  misc_feature 1..22: note = Synthetic construct
  source 1..22: mol_type = other DNA
gatcgagatatgaatatagctc

SEQ ID NO: 8388 - DNA, 22 bp, synthetic construct
  misc_feature 1..22: note = Synthetic construct
  source 1..22: mol_type = other DNA
atcgagatatgaatatagctct

SEQ ID NO: 8389 - DNA, 22 bp, synthetic construct
  misc_feature 1..22: note = Synthetic construct
  source 1..22: mol_type = other DNA
tcgagatatgaatatagctctg

SEQ ID NO: 8390 - DNA, 22 bp, synthetic construct
  misc_feature 1..22: note = Synthetic construct
  source 1..22: mol_type = other DNA
cgagatatgaatatagctctgg

SEQ ID NO: 8391 - DNA, 22 bp, synthetic construct
  misc_feature 1..22: note = Synthetic construct
  source 1..22: mol_type = other DNA
gagatatgaatatagctctggt

SEQ ID NO: 8392 - DNA, 22 bp, synthetic construct
  misc_feature 1..22: note = Synthetic construct
  source 1..22: mol_type = other DNA
agatatgaatatagctctggtg

SEQ ID NO: 8393 - DNA, 22 bp, synthetic construct
  misc_feature 1..22: note = Synthetic construct
  source 1..22: mol_type = other DNA
gatatgaatatagctctggtgg

SEQ ID NO: 8394 - DNA, 22 bp, synthetic construct
  misc_feature 1..22: note = Synthetic construct
  source 1..22: mol_type = other DNA
atatgaatatagctctggtggg

SEQ ID NO: 8395 - DNA, 22 bp, synthetic construct
  misc_feature 1..22: note = Synthetic construct
  source 1..22: mol_type = other DNA
tatgaatatagctctggtggga

SEQ ID NO: 8396 - DNA, 22 bp, synthetic construct
  misc_feature 1..22: note = Synthetic construct
  source 1..22: mol_type = other DNA
atgaatatagctctggtgggag

SEQ ID NO: 8397 - DNA, 22 bp, synthetic construct
  misc_feature 1..22: note = Synthetic construct
  source 1..22: mol_type = other DNA
tgaatatagctctggtgggaga

SEQ ID NO: 8398 - DNA, 22 bp, synthetic construct
  misc_feature 1..22: note = Synthetic construct
  source 1..22: mol_type = other DNA
gaatatagctctggtgggagaa

SEQ ID NO: 8399 - DNA, 22 bp, synthetic construct
  misc_feature 1..22: note = Synthetic construct
  source 1..22: mol_type = other DNA
aatatagctctggtgggagaaa

SEQ ID NO: 8400 - DNA, 22 bp, synthetic construct
  misc_feature 1..22: note = Synthetic construct
  source 1..22: mol_type = other DNA
atatagctctggtgggagaaaa

SEQ ID NO: 8401 - DNA, 22 bp, synthetic construct
  misc_feature 1..22: note = Synthetic construct
  source 1..22: mol_type = other DNA
tatagctctggtgggagaaaac

SEQ ID NO: 8402 - DNA, 22 bp, synthetic construct
  misc_feature 1..22: note = Synthetic construct
  source 1..22: mol_type = other DNA
atagctctggtgggagaaaact

SEQ ID NO: 8403 - DNA, 22 bp, synthetic construct
  misc_feature 1..22: note = Synthetic construct
  source 1..22: mol_type = other DNA
tagctctggtgggagaaaactc

SEQ ID NO: 8404 - DNA, 22 bp, synthetic construct
  misc_feature 1..22: note = Synthetic construct
  source 1..22: mol_type = other DNA
agctctggtgggagaaaactcc

SEQ ID NO: 8405 - DNA, 22 bp, synthetic construct
  misc_feature 1..22: note = Synthetic construct
  source 1..22: mol_type = other DNA
gctctggtgggagaaaactcca

SEQ ID NO: 8406 - DNA, 22 bp, synthetic construct
  misc_feature 1..22: note = Synthetic construct
  source 1..22: mol_type = other DNA
ctctggtgggagaaaactccac

SEQ ID NO: 8407 - DNA, 22 bp, synthetic construct
  misc_feature 1..22: note = Synthetic construct
  source 1..22: mol_type = other DNA
tctggtgggagaaaactccaca

SEQ ID NO: 8408 - DNA, 22 bp, synthetic construct
  misc_feature 1..22: note = Synthetic construct
  source 1..22: mol_type = other DNA
ctggtgggagaaaactccacac

SEQ ID NO: 8409 - DNA, 22 bp, synthetic construct
  misc_feature 1..22: note = Synthetic construct
  source 1..22: mol_type = other DNA
tggtgggagaaaactccacacc

SEQ ID NO: 8410 - DNA, 22 bp, synthetic construct
  misc_feature 1..22: note = Synthetic construct
  source 1..22: mol_type = other DNA
ggtgggagaaaactccacacca

SEQ ID NO: 8411 - DNA, 22 bp, synthetic construct
  misc_feature 1..22: note = Synthetic construct
  source 1..22: mol_type = other DNA
gtgggagaaaactccacaccag

SEQ ID NO: 8412 - DNA, 22 bp, synthetic construct
  misc_feature 1..22: note = Synthetic construct
  source 1..22: mol_type = other DNA
tgggagaaaactccacaccagg

SEQ ID NO: 8413 - DNA, 22 bp, synthetic construct
  misc_feature 1..22: note = Synthetic construct
  source 1..22: mol_type = other DNA
gggagaaaactccacaccaggc

SEQ ID NO: 8414 - DNA, 22 bp, synthetic construct
  misc_feature 1..22: note = Synthetic construct
  source 1..22: mol_type = other DNA
ggagaaaactccacaccaggcg

SEQ ID NO: 8415 - DNA, 22 bp, synthetic construct
  misc_feature 1..22: note = Synthetic construct
  source 1..22: mol_type = other DNA
gagaaaactccacaccaggcga

SEQ ID NO: 8416 - DNA, 22 bp, synthetic construct
  misc_feature 1..22: note = Synthetic construct
  source 1..22: mol_type = other DNA
agaaaactccacaccaggcgat

SEQ ID NO: 8417 - DNA, 22 bp, synthetic construct
  misc_feature 1..22: note = Synthetic construct
  source 1..22: mol_type = other DNA
gaaaactccacaccaggcgatc

SEQ ID NO: 8418 - DNA, 22 bp, synthetic construct
  misc_feature 1..22: note = Synthetic construct
  source 1..22: mol_type = other DNA
aaaactccacaccaggcgatcg

SEQ ID NO: 8419 - DNA, 22 bp, synthetic construct
  misc_feature 1..22: note = Synthetic construct
  source 1..22: mol_type = other DNA
aaactccacaccaggcgatcgg

SEQ ID NO: 8420 - DNA, 22 bp, synthetic construct
  misc_feature 1..22: note = Synthetic construct
  source 1..22: mol_type = other DNA
aactccacaccaggcgatcgga

SEQ ID NO: 8421 - DNA, 22 bp, synthetic construct
  misc_feature 1..22: note = Synthetic construct
  source 1..22: mol_type = other DNA
actccacaccaggcgatcggag

SEQ ID NO: 8422 - DNA, 22 bp, synthetic construct
  misc_feature 1..22: note = Synthetic construct
  source 1..22: mol_type = other DNA
ctccacaccaggcgatcggaga

SEQ ID NO: 8423 - DNA, 22 bp, synthetic construct
  misc_feature 1..22: note = Synthetic construct
  source 1..22: mol_type = other DNA
tccacaccaggcgatcggagat

SEQ ID NO: 8424 - DNA, 22 bp, synthetic construct
  misc_feature 1..22: note = Synthetic construct
  source 1..22: mol_type = other DNA
ccacaccaggcgatcggagatg

SEQ ID NO: 8425 - DNA, 22 bp, synthetic construct
  misc_feature 1..22: note = Synthetic construct
  source 1..22: mol_type = other DNA
cacaccaggcgatcggagatgg

SEQ ID NO: 8426 - DNA, 22 bp, synthetic construct
  misc_feature 1..22: note = Synthetic construct
  source 1..22: mol_type = other DNA
acaccaggcgatcggagatgga

SEQ ID NO: 8427 - DNA, 22 bp, synthetic construct
  misc_feature 1..22: note = Synthetic construct
  source 1..22: mol_type = other DNA
caccaggcgatcggagatggaa

SEQ ID NO: 8428 - DNA, 22 bp, synthetic construct
  misc_feature 1..22: note = Synthetic construct
  source 1..22: mol_type = other DNA
accaggcgatcggagatggaat

SEQ ID NO: 8429 - DNA, 22 bp, synthetic construct
  misc_feature 1..22: note = Synthetic construct
  source 1..22: mol_type = other DNA
ccaggcgatcggagatggaatc

SEQ ID NO: 8430 - DNA, 22 bp, synthetic construct
  misc_feature 1..22: note = Synthetic construct
  source 1..22: mol_type = other DNA
caggcgatcggagatggaatcg

SEQ ID NO: 8431 - DNA, 22 bp, synthetic construct
  misc_feature 1..22: note = Synthetic construct
  source 1..22: mol_type = other DNA
aggcgatcggagatggaatcgg

SEQ ID NO: 8432 - DNA, 22 bp, synthetic construct
  misc_feature 1..22: note = Synthetic construct
  source 1..22: mol_type = other DNA
ggcgatcggagatggaatcgga

SEQ ID NO: 8433 - DNA, 22 bp, synthetic construct
  misc_feature 1..22: note = Synthetic construct
  source 1..22: mol_type = other DNA
gcgatcggagatggaatcggat

SEQ ID NO: 8434 - DNA, 22 bp, synthetic construct
  misc_feature 1..22: note = Synthetic construct
  source 1..22: mol_type = other DNA
cgatcggagatggaatcggatg

SEQ ID NO: 8435 - DNA, 22 bp, synthetic construct
  misc_feature 1..22: note = Synthetic construct
  source 1..22: mol_type = other DNA
gatcggagatggaatcggatgc

SEQ ID NO: 8436 - DNA, 22 bp, synthetic construct
  misc_feature 1..22: note = Synthetic construct
  source 1..22: mol_type = other DNA
atcggagatggaatcggatgca

SEQ ID NO: 8437 - DNA, 22 bp, synthetic construct
  misc_feature 1..22: note = Synthetic construct
  source 1..22: mol_type = other DNA
tcggagatggaatcggatgcag

SEQ ID NO: 8438 - DNA, 22 bp, synthetic construct
  misc_feature 1..22: note = Synthetic construct
  source 1..22: mol_type = other DNA
cggagatggaatcggatgcaga

SEQ ID NO: 8439 - DNA, 22 bp, synthetic construct
  misc_feature 1..22: note = Synthetic construct
  source 1..22: mol_type = other DNA
ggagatggaatcggatgcagac

SEQ ID NO: 8440 - DNA, 22 bp, synthetic construct
  misc_feature 1..22: note = Synthetic construct
  source 1..22: mol_type = other DNA
gagatggaatcggatgcagacg

SEQ ID NO: 8441 - DNA, 22 bp, synthetic construct
  misc_feature 1..22: note = Synthetic construct
  source 1..22: mol_type = other DNA
agatggaatcggatgcagacga

SEQ ID NO: 8442 - DNA, 22 bp, synthetic construct
  misc_feature 1..22: note = Synthetic construct
  source 1..22: mol_type = other DNA
gatggaatcggatgcagacgat

SEQ ID NO: 8443 - DNA, 22 bp, synthetic construct
  misc_feature 1..22: note = Synthetic construct
  source 1..22: mol_type = other DNA
atggaatcggatgcagacgata

SEQ ID NO: 8444 - DNA, 22 bp, synthetic construct
  misc_feature 1..22: note = Synthetic construct
  source 1..22: mol_type = other DNA
tggaatcggatgcagacgataa

SEQ ID NO: 8445 - DNA, 22 bp, synthetic construct
  misc_feature 1..22: note = Synthetic construct
  source 1..22: mol_type = other DNA
ggaatcggatgcagacgataag

SEQ ID NO: 8446 - DNA, 22 bp, synthetic construct
  misc_feature 1..22: note = Synthetic construct
  source 1..22: mol_type = other DNA
gaatcggatgcagacgataagt

SEQ ID NO: 8447 - DNA, 22 bp, synthetic construct
  misc_feature 1..22: note = Synthetic construct
  source 1..22: mol_type = other DNA
aatcggatgcagacgataagtc

SEQ ID NO: 8448 - DNA, 22 bp, synthetic construct
  misc_feature 1..22: note = Synthetic construct
  source 1..22: mol_type = other DNA
atcggatgcagacgataagtct

SEQ ID NO: 8449 - DNA, 22 bp, synthetic construct
  misc_feature 1..22: note = Synthetic construct
  source 1..22: mol_type = other DNA
tcggatgcagacgataagtcta

SEQ ID NO: 8450 - DNA, 22 bp, synthetic construct
  misc_feature 1..22: note = Synthetic construct
  source 1..22: mol_type = other DNA
cggatgcagacgataagtctat

SEQ ID NO: 8451 - DNA, 22 bp, synthetic construct
  misc_feature 1..22: note = Synthetic construct
  source 1..22: mol_type = other DNA
ggatgcagacgataagtctatc

SEQ ID NO: 8452 - DNA, 22 bp, synthetic construct
  misc_feature 1..22: note = Synthetic construct
  source 1..22: mol_type = other DNA
gatgcagacgataagtctatcg

SEQ ID NO: 8453 - DNA, 22 bp, synthetic construct
  misc_feature 1..22: note = Synthetic construct
  source 1..22: mol_type = other DNA
atgcagacgataagtctatcgt

SEQ ID NO: 8454 - DNA, 22 bp, synthetic construct
  misc_feature 1..22: note = Synthetic construct
  source 1..22: mol_type = other DNA
tgcagacgataagtctatcgtc

SEQ ID NO: 8455 - DNA, 22 bp, synthetic construct
  misc_feature 1..22: note = Synthetic construct
  source 1..22: mol_type = other DNA
gcagacgataagtctatcgtcg

SEQ ID NO: 8456 - DNA, 22 bp, synthetic construct
  misc_feature 1..22: note = Synthetic construct
  source 1..22: mol_type = other DNA
cagacgataagtctatcgtcgc

SEQ ID NO: 8457 - DNA, 22 bp, synthetic construct
  misc_feature 1..22: note = Synthetic construct
  source 1..22: mol_type = other DNA
agacgataagtctatcgtcgca

SEQ ID NO: 8458 - DNA, 22 bp, synthetic construct
  misc_feature 1..22: note = Synthetic construct
  source 1..22: mol_type = other DNA
gacgataagtctatcgtcgcaa

SEQ ID NO: 8459 - DNA, 22 bp, synthetic construct
  misc_feature 1..22: note = Synthetic construct
  source 1..22: mol_type = other DNA
acgataagtctatcgtcgcaag

SEQ ID NO: 8460 - DNA, 22 bp, synthetic construct
  misc_feature 1..22: note = Synthetic construct
  source 1..22: mol_type = other DNA
cgataagtctatcgtcgcaagc

SEQ ID NO: 8461 - DNA, 22 bp, synthetic construct
  misc_feature 1..22: note = Synthetic construct
  source 1..22: mol_type = other DNA
gataagtctatcgtcgcaagcg

SEQ ID NO: 8462 - DNA, 22 bp, synthetic construct
  misc_feature 1..22: note = Synthetic construct
  source 1..22: mol_type = other DNA
ataagtctatcgtcgcaagcga

SEQ ID NO: 8463 - DNA, 22 bp, synthetic construct
  misc_feature 1..22: note = Synthetic construct
  source 1..22: mol_type = other DNA
taagtctatcgtcgcaagcgaa

SEQ ID NO: 8464 - DNA, 22 bp, synthetic construct
  misc_feature 1..22: note = Synthetic construct
  source 1..22: mol_type = other DNA
aagtctatcgtcgcaagcgaac

SEQ ID NO: 8465 - DNA, 22 bp, synthetic construct
  misc_feature 1..22: note = Synthetic construct
  source 1..22: mol_type = other DNA
agtctatcgtcgcaagcgaacc

SEQ ID NO: 8466 - DNA, 22 bp, synthetic construct
  misc_feature 1..22: note = Synthetic construct
  source 1..22: mol_type = other DNA
gtctatcgtcgcaagcgaacca

SEQ ID NO: 8467 - DNA, 22 bp, synthetic construct
  misc_feature 1..22: note = Synthetic construct
  source 1..22: mol_type = other DNA
tctatcgtcgcaagcgaaccat

SEQ ID NO: 8468 - DNA, 22 bp, synthetic construct
  misc_feature 1..22: note = Synthetic construct
  source 1..22: mol_type = other DNA
ctatcgtcgcaagcgaaccatc

SEQ ID NO: 8469 - DNA, 22 bp, synthetic construct
  misc_feature 1..22: note = Synthetic construct
  source 1..22: mol_type = other DNA
tatcgtcgcaagcgaaccatct

SEQ ID NO: 8470 - DNA, 22 bp, synthetic construct
  misc_feature 1..22: note = Synthetic construct
  source 1..22: mol_type = other DNA
atcgtcgcaagcgaaccatcta

SEQ ID NO: 8471 - DNA, 22 bp, synthetic construct
  misc_feature 1..22: note = Synthetic construct
  source 1..22: mol_type = other DNA
tcgtcgcaagcgaaccatctac

SEQ ID NO: 8472 - DNA, 22 bp, synthetic construct
  misc_feature 1..22: note = Synthetic construct
  source 1..22: mol_type = other DNA
cgtcgcaagcgaaccatctacg

SEQ ID NO: 8473 - DNA, 22 bp, synthetic construct
  misc_feature 1..22: note = Synthetic construct
  source 1..22: mol_type = other DNA
gtcgcaagcgaaccatctacgc

SEQ ID NO: 8474 - DNA, 22 bp, synthetic construct
  misc_feature 1..22: note = Synthetic construct
  source 1..22: mol_type = other DNA
tcgcaagcgaaccatctacgct

SEQ ID NO: 8475 - DNA, 22 bp, synthetic construct
  misc_feature 1..22: note = Synthetic construct
  source 1..22: mol_type = other DNA
cgcaagcgaaccatctacgctg

SEQ ID NO: 8476 - DNA, 22 bp, synthetic construct
  misc_feature 1..22: note = Synthetic construct
  source 1..22: mol_type = other DNA
gcaagcgaaccatctacgctgc

SEQ ID NO: 8477 - DNA, 22 bp, synthetic construct
  misc_feature 1..22: note = Synthetic construct
  source 1..22: mol_type = other DNA
caagcgaaccatctacgctgcc

SEQ ID NO: 8478 - DNA, 22 bp, synthetic construct
  misc_feature 1..22: note = Synthetic construct
  source 1..22: mol_type = other DNA
aagcgaaccatctacgctgccc

SEQ ID NO: 8479 - DNA, 22 bp, synthetic construct
  misc_feature 1..22: note = Synthetic construct
  source 1..22: mol_type = other DNA
agcgaaccatctacgctgccct

SEQ ID NO: 8480 - DNA, 22 bp, synthetic construct
  misc_feature 1..22: note = Synthetic construct
  source 1..22: mol_type = other DNA
gcgaaccatctacgctgccctg

SEQ ID NO: 8481 - DNA, 22 bp, synthetic construct
  misc_feature 1..22: note = Synthetic construct
  source 1..22: mol_type = other DNA
cgaaccatctacgctgccctgc

SEQ ID NO: 8482 - DNA, 22 bp, synthetic construct
  misc_feature 1..22: note = Synthetic construct
  source 1..22: mol_type = other DNA
gaaccatctacgctgccctgct

SEQ ID NO: 8483 - DNA, 22 bp, synthetic construct
  misc_feature 1..22: note = Synthetic construct
  source 1..22: mol_type = other DNA
aaccatctacgctgccctgctg

SEQ ID NO: 8484 - DNA, 22 bp, synthetic construct
  misc_feature 1..22: note = Synthetic construct
  source 1..22: mol_type = other DNA
accatctacgctgccctgctga

SEQ ID NO: 8485 - DNA, 22 bp, synthetic construct
  misc_feature 1..22: note = Synthetic construct
  source 1..22: mol_type = other DNA
ccatctacgctgccctgctgag

SEQ ID NO: 8486 - DNA, 22 bp, synthetic construct
  misc_feature 1..22: note = Synthetic construct
  source 1..22: mol_type = other DNA
catctacgctgccctgctgagc

SEQ ID NO: 8487 - DNA, 22 bp, synthetic construct
  misc_feature 1..22: note = Synthetic construct
  source 1..22: mol_type = other DNA
atctacgctgccctgctgagcc

SEQ ID NO: 8488 - DNA, 22 bp, synthetic construct
  misc_feature 1..22: note = Synthetic construct
  source 1..22: mol_type = other DNA
tctacgctgccctgctgagcca

SEQ ID NO: 8489 - DNA, 22 bp, synthetic construct
  misc_feature 1..22: note = Synthetic construct
  source 1..22: mol_type = other DNA
ctacgctgccctgctgagccag

SEQ ID NO: 8490 - DNA, 22 bp, synthetic construct
  misc_feature 1..22: note = Synthetic construct
  source 1..22: mol_type = other DNA
tacgctgccctgctgagccaga

SEQ ID NO: 8491 - DNA, 22 bp, synthetic construct
  misc_feature 1..22: note = Synthetic construct
  source 1..22: mol_type = other DNA
acgctgccctgctgagccagac

SEQ ID NO: 8492 - DNA, 22 bp, synthetic construct
  misc_feature 1..22: note = Synthetic construct
  source 1..22: mol_type = other DNA
cgctgccctgctgagccagacg

SEQ ID NO: 8493 - DNA, 22 bp, synthetic construct
  misc_feature 1..22: note = Synthetic construct
  source 1..22: mol_type = other DNA
gctgccctgctgagccagacgc

SEQ ID NO: 8494 - DNA, 22 bp, synthetic construct
  misc_feature 1..22: note = Synthetic construct
  source 1..22: mol_type = other DNA
ctgccctgctgagccagacgct

SEQ ID NO: 8495 - DNA, 22 bp, synthetic construct
  misc_feature 1..22: note = Synthetic construct
  source 1..22: mol_type = other DNA
tgccctgctgagccagacgctg

SEQ ID NO: 8496 - DNA, 22 bp, synthetic construct
  misc_feature 1..22: note = Synthetic construct
  source 1..22: mol_type = other DNA
gccctgctgagccagacgctgg

SEQ ID NO: 8497 - DNA, 22 bp, synthetic construct
  misc_feature 1..22: note = Synthetic construct
  source 1..22: mol_type = other DNA
ccctgctgagccagacgctggt

SEQ ID NO: 8498 - DNA, 22 bp, synthetic construct
  misc_feature 1..22: note = Synthetic construct
  source 1..22: mol_type = other DNA
cctgctgagccagacgctggtt

SEQ ID NO: 8499 - DNA, 22 bp, synthetic construct
  misc_feature 1..22: note = Synthetic construct
  source 1..22: mol_type = other DNA
ctgctgagccagacgctggttg

SEQ ID NO: 8500 - DNA, 22 bp, synthetic construct
  misc_feature 1..22: note = Synthetic construct
  source 1..22: mol_type = other DNA
tgctgagccagacgctggttga

SEQ ID NO: 8501 - DNA, 22 bp, synthetic construct
  misc_feature 1..22: note = Synthetic construct
  source 1..22: mol_type = other DNA
gctgagccagacgctggttgat

SEQ ID NO: 8502 - DNA, 22 bp, synthetic construct
  misc_feature 1..22: note = Synthetic construct
  source 1..22: mol_type = other DNA
ctgagccagacgctggttgatc

SEQ ID NO: 8503 - DNA, 22 bp, synthetic construct
  misc_feature 1..22: note = Synthetic construct
  source 1..22: mol_type = other DNA
tgagccagacgctggttgatcg

SEQ ID NO: 8504 - DNA, 22 bp, synthetic construct
  misc_feature 1..22: note = Synthetic construct
  source 1..22: mol_type = other DNA
gagccagacgctggttgatcga

SEQ ID NO: 8505 - DNA, 22 bp, synthetic construct
  misc_feature 1..22: note = Synthetic construct
  source 1..22: mol_type = other DNA
agccagacgctggttgatcgat

SEQ ID NO: 8506 - DNA, 22 bp, synthetic construct
  misc_feature 1..22: note = Synthetic construct
  source 1..22: mol_type = other DNA
gccagacgctggttgatcgatt

SEQ ID NO: 8507 - DNA, 22 bp, synthetic construct
  misc_feature 1..22: note = Synthetic construct
  source 1..22: mol_type = other DNA
ccagacgctggttgatcgattg

SEQ ID NO: 8508 - DNA, 22 bp, synthetic construct
  misc_feature 1..22: note = Synthetic construct
  source 1..22: mol_type = other DNA
cagacgctggttgatcgattga

SEQ ID NO: 8509 - DNA, 22 bp, synthetic construct
  misc_feature 1..22: note = Synthetic construct
  source 1..22: mol_type = other DNA
agacgctggttgatcgattgat

SEQ ID NO: 8510 - DNA, 22 bp, synthetic construct
  misc_feature 1..22: note = Synthetic construct
  source 1..22: mol_type = other DNA
gacgctggttgatcgattgatc

SEQ ID NO: 8511 - DNA, 22 bp, synthetic construct
  misc_feature 1..22: note = Synthetic construct
  source 1..22: mol_type = other DNA
acgctggttgatcgattgatca

SEQ ID NO: 8512 - DNA, 22 bp, synthetic construct
  misc_feature 1..22: note = Synthetic construct
  source 1..22: mol_type = other DNA
cgctggttgatcgattgatcat

SEQ ID NO: 8513 - DNA, 22 bp, synthetic construct
  misc_feature 1..22: note = Synthetic construct
  source 1..22: mol_type = other DNA
gctggttgatcgattgatcatt

SEQ ID NO: 8514 - DNA, 22 bp, synthetic construct
  misc_feature 1..22: note = Synthetic construct
  source 1..22: mol_type = other DNA
ctggttgatcgattgatcattc

SEQ ID NO: 8515 - DNA, 22 bp, synthetic construct
  misc_feature 1..22: note = Synthetic construct
  source 1..22: mol_type = other DNA
tggttgatcgattgatcattca

SEQ ID NO: 8516 - DNA, 22 bp, synthetic construct
  misc_feature 1..22: note = Synthetic construct
  source 1..22: mol_type = other DNA
ggttgatcgattgatcattcag

SEQ ID NO: 8517 - DNA, 22 bp, synthetic construct
  misc_feature 1..22: note = Synthetic construct
  source 1..22: mol_type = other DNA
gttgatcgattgatcattcagg

SEQ ID NO: 8518 - DNA, 22 bp, synthetic construct
  misc_feature 1..22: note = Synthetic construct
  source 1..22: mol_type = other DNA
ttgatcgattgatcattcaggt

SEQ ID NO: 8519 - DNA, 22 bp, synthetic construct
  misc_feature 1..22: note = Synthetic construct
  source 1..22: mol_type = other DNA
tgatcgattgatcattcaggtc

SEQ ID NO: 8520 - DNA, 22 bp, synthetic construct
  misc_feature 1..22: note = Synthetic construct
  source 1..22: mol_type = other DNA
gatcgattgatcattcaggtct

SEQ ID NO: 8521 - DNA, 22 bp, synthetic construct
  misc_feature 1..22: note = Synthetic construct
  source 1..22: mol_type = other DNA
atcgattgatcattcaggtcta

SEQ ID NO: 8522 - DNA, 22 bp, synthetic construct
  misc_feature 1..22: note = Synthetic construct
  source 1..22: mol_type = other DNA
tcgattgatcattcaggtctat

SEQ ID NO: 8523 - DNA, 22 bp, synthetic construct
  misc_feature 1..22: note = Synthetic construct
  source 1..22: mol_type = other DNA
cgattgatcattcaggtctata

SEQ ID NO: 8524 - DNA, 22 bp, synthetic construct
  misc_feature 1..22: note = Synthetic construct
  source 1..22: mol_type = other DNA
gattgatcattcaggtctatac

SEQ ID NO: 8525 - DNA, 22 bp, synthetic construct
  misc_feature 1..22: note = Synthetic construct
  source 1..22: mol_type = other DNA
attgatcattcaggtctatacc

SEQ ID NO: 8526 - DNA, 22 bp, synthetic construct
  misc_feature 1..22: note = Synthetic construct
  source 1..22: mol_type = other DNA
ttgatcattcaggtctatacca

SEQ ID NO: 8527 - DNA, 22 bp, synthetic construct
  misc_feature 1..22: note = Synthetic construct
  source 1..22: mol_type = other DNA
tgatcattcaggtctataccaa

SEQ ID NO: 8528 - DNA, 22 bp, synthetic construct
  misc_feature 1..22: note = Synthetic construct
  source 1..22: mol_type = other DNA
gatcattcaggtctataccaac

SEQ ID NO: 8529 - DNA, 22 bp, synthetic construct
  misc_feature 1..22: note = Synthetic construct
  source 1..22: mol_type = other DNA
atcattcaggtctataccaacg

SEQ ID NO: 8530 - DNA, 22 bp, synthetic construct
  misc_feature 1..22: note = Synthetic construct
  source 1..22: mol_type = other DNA
tcattcaggtctataccaacgg

SEQ ID NO: 8531 - DNA, 22 bp, synthetic construct
  misc_feature 1..22: note = Synthetic construct
  source 1..22: mol_type = other DNA
cattcaggtctataccaacgga

SEQ ID NO: 8532 - DNA, 22 bp, synthetic construct
  misc_feature 1..22: note = Synthetic construct
  source 1..22: mol_type = other DNA
attcaggtctataccaacggat

SEQ ID NO: 8533 - DNA, 22 bp, synthetic construct
  misc_feature 1..22: note = Synthetic construct
  source 1..22: mol_type = other DNA
ttcaggtctataccaacggatt

SEQ ID NO: 8534 - DNA, 22 bp, synthetic construct
  misc_feature 1..22: note = Synthetic construct
  source 1..22: mol_type = other DNA
tcaggtctataccaacggattt

SEQ ID NO: 8535 - DNA, 22 bp, synthetic construct
  misc_feature 1..22: note = Synthetic construct
  source 1..22: mol_type = other DNA
caggtctataccaacggatttg

SEQ ID NO: 8536 - DNA, 22 bp, synthetic construct
  misc_feature 1..22: note = Synthetic construct
  source 1..22: mol_type = other DNA
aggtctataccaacggatttga

SEQ ID NO: 8537 - DNA, 22 bp, synthetic construct
  misc_feature 1..22: note = Synthetic construct
  source 1..22: mol_type = other DNA
ggtctataccaacggatttgag

SEQ ID NO: 8538 - DNA, 22 bp, synthetic construct
  misc_feature 1..22: note = Synthetic construct
  source 1..22: mol_type = other DNA
gtctataccaacggatttgagc

SEQ ID NO: 8539 - DNA, 22 bp, synthetic construct
  misc_feature 1..22: note = Synthetic construct
  source 1..22: mol_type = other DNA
tctataccaacggatttgagcc

SEQ ID NO: 8540 - DNA, 22 bp, synthetic construct
  misc_feature 1..22: note = Synthetic construct
  source 1..22: mol_type = other DNA
ctataccaacggatttgagccg

SEQ ID NO: 8541 - DNA, 22 bp, synthetic construct
  misc_feature 1..22: note = Synthetic construct
  source 1..22: mol_type = other DNA
tataccaacggatttgagccgg

SEQ ID NO: 8542 - DNA, 22 bp, synthetic construct
  misc_feature 1..22: note = Synthetic construct
  source 1..22: mol_type = other DNA
ataccaacggatttgagccggc

SEQ ID NO: 8543 - DNA, 22 bp, synthetic construct
  misc_feature 1..22: note = Synthetic construct
  source 1..22: mol_type = other DNA
taccaacggatttgagccggcg

SEQ ID NO: 8544 - DNA, 22 bp, synthetic construct
  misc_feature 1..22: note = Synthetic construct
  source 1..22: mol_type = other DNA
accaacggatttgagccggcgt

SEQ ID NO: 8545 - DNA, 22 bp, synthetic construct
  misc_feature 1..22: note = Synthetic construct
  source 1..22: mol_type = other DNA
ccaacggatttgagccggcgtc

SEQ ID NO: 8546 - DNA, 22 bp, synthetic construct
  misc_feature 1..22: note = Synthetic construct
  source 1..22: mol_type = other DNA
caacggatttgagccggcgtct

SEQ ID NO: 8547 - DNA, 22 bp, synthetic construct
  misc_feature 1..22: note = Synthetic construct
  source 1..22: mol_type = other DNA
aacggatttgagccggcgtctg

SEQ ID NO: 8548 - DNA, 22 bp, synthetic construct
  misc_feature 1..22: note = Synthetic construct
  source 1..22: mol_type = other DNA
acggatttgagccggcgtctga

SEQ ID NO: 8549 - DNA, 22 bp, synthetic construct
  misc_feature 1..22: note = Synthetic construct
  source 1..22: mol_type = other DNA
cggatttgagccggcgtctgat

SEQ ID NO: 8550 - DNA, 22 bp, synthetic construct
  misc_feature 1..22: note = Synthetic construct
  source 1..22: mol_type = other DNA
ggatttgagccggcgtctgatg

SEQ ID NO: 8551 - DNA, 22 bp, synthetic construct
  misc_feature 1..22: note = Synthetic construct
  source 1..22: mol_type = other DNA
gatttgagccggcgtctgatga

SEQ ID NO: 8552 - DNA, 22 bp, synthetic construct
  misc_feature 1..22: note = Synthetic construct
  source 1..22: mol_type = other DNA
atttgagccggcgtctgatgaa

SEQ ID NO: 8553 - DNA, 22 bp, synthetic construct
  misc_feature 1..22: note = Synthetic construct
  source 1..22: mol_type = other DNA
tttgagccggcgtctgatgaaa

SEQ ID NO: 8554 - DNA, 22 bp, synthetic construct
  misc_feature 1..22: note = Synthetic construct
  source 1..22: mol_type = other DNA
ttgagccggcgtctgatgaaag

SEQ ID NO: 8555 - DNA, 22 bp, synthetic construct
  misc_feature 1..22: note = Synthetic construct
  source 1..22: mol_type = other DNA
tgagccggcgtctgatgaaagc

SEQ ID NO: 8556 - DNA, 22 bp, synthetic construct
  misc_feature 1..22: note = Synthetic construct
  source 1..22: mol_type = other DNA
gagccggcgtctgatgaaagca

SEQ ID NO: 8557 - DNA, 22 bp, synthetic construct
  misc_feature 1..22: note = Synthetic construct
  source 1..22: mol_type = other DNA
agccggcgtctgatgaaagcac

SEQ ID NO: 8558 - DNA, 22 bp, synthetic construct
  misc_feature 1..22: note = Synthetic construct
  source 1..22: mol_type = other DNA
gccggcgtctgatgaaagcacc

SEQ ID NO: 8559 - DNA, 22 bp, synthetic construct
  misc_feature 1..22: note = Synthetic construct
  source 1..22: mol_type = other DNA
ccggcgtctgatgaaagcaccg

SEQ ID NO: 8560 - DNA, 22 bp, synthetic construct
  misc_feature 1..22: note = Synthetic construct
  source 1..22: mol_type = other DNA
cggcgtctgatgaaagcaccga

SEQ ID NO: 8561 - DNA, 22 bp, synthetic construct
  misc_feature 1..22: note = Synthetic construct
  source 1..22: mol_type = other DNA
ggcgtctgatgaaagcaccgac

SEQ ID NO: 8562 - DNA, 22 bp, synthetic construct
  misc_feature 1..22: note = Synthetic construct
  source 1..22: mol_type = other DNA
gcgtctgatgaaagcaccgacc

SEQ ID NO: 8563 - DNA, 22 bp, synthetic construct
  misc_feature 1..22: note = Synthetic construct
  source 1..22: mol_type = other DNA
cgtctgatgaaagcaccgaccc

SEQ ID NO: 8564 - DNA, 22 bp, synthetic construct
  misc_feature 1..22: note = Synthetic construct
  source 1..22: mol_type = other DNA
gtctgatgaaagcaccgacccc

SEQ ID NO: 8565 - DNA, 22 bp, synthetic construct
  misc_feature 1..22: note = Synthetic construct
  source 1..22: mol_type = other DNA
tctgatgaaagcaccgacccct

SEQ ID NO: 8566 - DNA, 22 bp, synthetic construct
  misc_feature 1..22: note = Synthetic construct
  source 1..22: mol_type = other DNA
ctgatgaaagcaccgacccctt

SEQ ID NO: 8567 - DNA, 22 bp, synthetic construct
  misc_feature 1..22: note = Synthetic construct
  source 1..22: mol_type = other DNA
tgatgaaagcaccgaccccttt

SEQ ID NO: 8568 - DNA, 22 bp, synthetic construct
  misc_feature 1..22: note = Synthetic construct
  source 1..22: mol_type = other DNA
gatgaaagcaccgacccctttc

SEQ ID NO: 8569 - DNA, 22 bp, synthetic construct
  misc_feature 1..22: note = Synthetic construct
  source 1..22: mol_type = other DNA
atgaaagcaccgacccctttct

SEQ ID NO: 8570 - DNA, 22 bp, synthetic construct
  misc_feature 1..22: note = Synthetic construct
  source 1..22: mol_type = other DNA
tgaaagcaccgacccctttctg

SEQ ID NO: 8571 - DNA, 22 bp, synthetic construct
  misc_feature 1..22: note = Synthetic construct
  source 1..22: mol_type = other DNA
gaaagcaccgacccctttctgg

SEQ ID NO: 8572 - DNA, 22 bp, synthetic construct
  misc_feature 1..22: note = Synthetic construct
  source 1..22: mol_type = other DNA
aaagcaccgacccctttctgga

SEQ ID NO: 8573 - DNA, 22 bp, synthetic construct
  misc_feature 1..22: note = Synthetic construct
  source 1..22: mol_type = other DNA
aagcaccgacccctttctggag

SEQ ID NO: 8574 - DNA, 22 bp, synthetic construct
  misc_feature 1..22: note = Synthetic construct
  source 1..22: mol_type = other DNA
agcaccgacccctttctggagg

SEQ ID NO: 8575 - DNA, 22 bp, synthetic construct
  misc_feature 1..22: note = Synthetic construct
  source 1..22: mol_type = other DNA
gcaccgacccctttctggaggt

SEQ ID NO: 8576 - DNA, 22 bp, synthetic construct
  misc_feature 1..22: note = Synthetic construct
  source 1..22: mol_type = other DNA
caccgacccctttctggaggta

SEQ ID NO: 8577 - DNA, 22 bp, synthetic construct
  misc_feature 1..22: note = Synthetic construct
  source 1..22: mol_type = other DNA
accgacccctttctggaggtac

SEQ ID NO: 8578 - DNA, 22 bp, synthetic construct
  misc_feature 1..22: note = Synthetic construct
  source 1..22: mol_type = other DNA
ccgacccctttctggaggtaca

SEQ ID NO: 8579 - DNA, 22 bp, synthetic construct
  misc_feature 1..22: note = Synthetic construct
  source 1..22: mol_type = other DNA
cgacccctttctggaggtacat

SEQ ID NO: 8580 - DNA, 22 bp, synthetic construct
  misc_feature 1..22: note = Synthetic construct
  source 1..22: mol_type = other DNA
gacccctttctggaggtacata

SEQ ID NO: 8581 - DNA, 22 bp, synthetic construct
  misc_feature 1..22: note = Synthetic construct
  source 1..22: mol_type = other DNA
acccctttctggaggtacatat

SEQ ID NO: 8582 - DNA, 22 bp, synthetic construct
  misc_feature 1..22: note = Synthetic construct
  source 1..22: mol_type = other DNA
cccctttctggaggtacatatt

SEQ ID NO: 8583 - DNA, 22 bp, synthetic construct
  misc_feature 1..22: note = Synthetic construct
  source 1..22: mol_type = other DNA
ccctttctggaggtacatattc

SEQ ID NO: 8584 - DNA, 22 bp, synthetic construct
  misc_feature 1..22: note = Synthetic construct
  source 1..22: mol_type = other DNA
cctttctggaggtacatattca

SEQ ID NO: 8585 - DNA, 22 bp, synthetic construct
  misc_feature 1..22: note = Synthetic construct
  source 1..22: mol_type = other DNA
ctttctggaggtacatattcat

SEQ ID NO: 8586 - DNA, 22 bp, synthetic construct
  misc_feature 1..22: note = Synthetic construct
  source 1..22: mol_type = other DNA
tttctggaggtacatattcata

SEQ ID NO: 8587 - DNA, 22 bp, synthetic construct
  misc_feature 1..22: note = Synthetic construct
  source 1..22: mol_type = other DNA
ttctggaggtacatattcatat

SEQ ID NO: 8588 - DNA, 22 bp, synthetic construct
  misc_feature 1..22: note = Synthetic construct
  source 1..22: mol_type = other DNA
tctggaggtacatattcatatc

SEQ ID NO: 8589 - DNA, 22 bp, synthetic construct
  misc_feature 1..22: note = Synthetic construct
  source 1..22: mol_type = other DNA
ctggaggtacatattcatatca

SEQ ID NO: 8590 - DNA, 22 bp, synthetic construct
  misc_feature 1..22: note = Synthetic construct
  source 1..22: mol_type = other DNA
tggaggtacatattcatatcag

SEQ ID NO: 8591 - DNA, 22 bp, synthetic construct
  misc_feature 1..22: note = Synthetic construct
  source 1..22: mol_type = other DNA
ggaggtacatattcatatcagg

SEQ ID NO: 8592 - DNA, 22 bp, synthetic construct
  misc_feature 1..22: note = Synthetic construct
  source 1..22: mol_type = other DNA
gaggtacatattcatatcaggc

SEQ ID NO: 8593 - DNA, 22 bp, synthetic construct
  misc_feature 1..22: note = Synthetic construct
  source 1..22: mol_type = other DNA
aggtacatattcatatcaggct

SEQ ID NO: 8594 - DNA, 22 bp, synthetic construct
  misc_feature 1..22: note = Synthetic construct
  source 1..22: mol_type = other DNA
ggtacatattcatatcaggctc

SEQ ID NO: 8595 - DNA, 22 bp, synthetic construct
  misc_feature 1..22: note = Synthetic construct
  source 1..22: mol_type = other DNA
gtacatattcatatcaggctcc

SEQ ID NO: 8596 - DNA, 22 bp, synthetic construct
  misc_feature 1..22: note = Synthetic construct
  source 1..22: mol_type = other DNA
tacatattcatatcaggctcct

SEQ ID NO: 8597 - DNA, 22 bp, synthetic construct
  misc_feature 1..22: note = Synthetic construct
  source 1..22: mol_type = other DNA
acatattcatatcaggctcctt

SEQ ID NO: 8598 - DNA, 22 bp, synthetic construct
  misc_feature 1..22: note = Synthetic construct
  source 1..22: mol_type = other DNA
catattcatatcaggctcctta

SEQ ID NO: 8599 - DNA, 22 bp, synthetic construct
  misc_feature 1..22: note = Synthetic construct
  source 1..22: mol_type = other DNA
atattcatatcaggctccttac

SEQ ID NO: 8600 - DNA, 22 bp, synthetic construct
  misc_feature 1..22: note = Synthetic construct
  source 1..22: mol_type = other DNA
tattcatatcaggctccttaca

SEQ ID NO: 8601 - DNA, 22 bp, synthetic construct
  misc_feature 1..22: note = Synthetic construct
  source 1..22: mol_type = other DNA
attcatatcaggctccttacag

SEQ ID NO: 8602 - DNA, 22 bp, synthetic construct
  misc_feature 1..22: note = Synthetic construct
  source 1..22: mol_type = other DNA
ttcatatcaggctccttacagg

SEQ ID NO: 8603 - DNA, 22 bp, synthetic construct
  misc_feature 1..22: note = Synthetic construct
  source 1..22: mol_type = other DNA
tcatatcaggctccttacaggc

SEQ ID NO: 8604 - DNA, 22 bp, synthetic construct
  misc_feature 1..22: note = Synthetic construct
  source 1..22: mol_type = other DNA
catatcaggctccttacaggca

SEQ ID NO: 8605 - DNA, 22 bp, synthetic construct
  misc_feature 1..22: note = Synthetic construct
  source 1..22: mol_type = other DNA
atatcaggctccttacaggcag

SEQ ID NO: 8606 - DNA, 22 bp, synthetic construct
  misc_feature 1..22: note = Synthetic construct
  source 1..22: mol_type = other DNA
tatcaggctccttacaggcagc

SEQ ID NO: 8607 - DNA, 22 bp, synthetic construct
  misc_feature 1..22: note = Synthetic construct
  source 1..22: mol_type = other DNA
atcaggctccttacaggcagcc

SEQ ID NO: 8608 - DNA, 22 bp, synthetic construct
  misc_feature 1..22: note = Synthetic construct
  source 1..22: mol_type = other DNA
tcaggctccttacaggcagccc

SEQ ID NO: 8609 - DNA, 22 bp, synthetic construct
  misc_feature 1..22: note = Synthetic construct
  source 1..22: mol_type = other DNA
caggctccttacaggcagcccg

SEQ ID NO: 8610 - DNA, 22 bp, synthetic construct
  misc_feature 1..22: note = Synthetic construct
  source 1..22: mol_type = other DNA
aggctccttacaggcagcccga

SEQ ID NO: 8611 - DNA, 22 bp, synthetic construct
  misc_feature 1..22: note = Synthetic construct
  source 1..22: mol_type = other DNA
ggctccttacaggcagcccgat

SEQ ID NO: 8612 - DNA, 22 bp, synthetic construct
  misc_feature 1..22: note = Synthetic construct
  source 1..22: mol_type = other DNA
gctccttacaggcagcccgatc

SEQ ID NO: 8613 - DNA, 22 bp, synthetic construct
  misc_feature 1..22: note = Synthetic construct
  source 1..22: mol_type = other DNA
ctccttacaggcagcccgatct

SEQ ID NO: 8614 - DNA, 22 bp, synthetic construct
  misc_feature 1..22: note = Synthetic construct
  source 1..22: mol_type = other DNA
tccttacaggcagcccgatcta

SEQ ID NO: 8615 - DNA, 22 bp, synthetic construct
  misc_feature 1..22: note = Synthetic construct
  source 1..22: mol_type = other DNA
ccttacaggcagcccgatctat

SEQ ID NO: 8616 - DNA, 22 bp, synthetic construct
  misc_feature 1..22: note = Synthetic construct
  source 1..22: mol_type = other DNA
cttacaggcagcccgatctatt

SEQ ID NO: 8617 - DNA, 22 bp, synthetic construct
  misc_feature 1..22: note = Synthetic construct
  source 1..22: mol_type = other DNA
ttacaggcagcccgatctattt

SEQ ID NO: 8618 - DNA, 22 bp, synthetic construct
  misc_feature 1..22: note = Synthetic construct
  source 1..22: mol_type = other DNA
tacaggcagcccgatctatttt

SEQ ID NO: 8619 - DNA, 22 bp, synthetic construct
  misc_feature 1..22: note = Synthetic construct
  source 1..22: mol_type = other DNA
acaggcagcccgatctatttta

SEQ ID NO: 8620 - DNA, 22 bp, synthetic construct
  misc_feature 1..22: note = Synthetic construct
  source 1..22: mol_type = other DNA
caggcagcccgatctattttat

SEQ ID NO: 8621 - DNA, 22 bp, synthetic construct
  misc_feature 1..22: note = Synthetic construct
  source 1..22: mol_type = other DNA
aggcagcccgatctattttatt

SEQ ID NO: 8622 - DNA, 22 bp, synthetic construct
  misc_feature 1..22: note = Synthetic construct
  source 1..22: mol_type = other DNA
ggcagcccgatctattttatta

SEQ ID NO: 8623 - DNA, 22 bp, synthetic construct
  misc_feature 1..22: note = Synthetic construct
  source 1..22: mol_type = other DNA
gcagcccgatctattttattat

SEQ ID NO: 8624 - DNA, 22 bp, synthetic construct
  misc_feature 1..22: note = Synthetic construct
  source 1..22: mol_type = other DNA
cagcccgatctattttattatt

SEQ ID NO: 8625 - DNA, 22 bp, synthetic construct
  misc_feature 1..22: note = Synthetic construct
  source 1..22: mol_type = other DNA
agcccgatctattttattattc

SEQ ID NO: 8626 - DNA, 22 bp, synthetic construct
  misc_feature 1..22: note = Synthetic construct
  source 1..22: mol_type = other DNA
gcccgatctattttattattct

SEQ ID NO: 8627 - DNA, 22 bp, synthetic construct
  misc_feature 1..22: note = Synthetic construct
  source 1..22: mol_type = other DNA
cccgatctattttattattctt

SEQ ID NO: 8628 - DNA, 22 bp, synthetic construct
  misc_feature 1..22: note = Synthetic construct
  source 1..22: mol_type = other DNA
ccgatctattttattattcttc

SEQ ID NO: 8629 - DNA, 22 bp, synthetic construct
  misc_feature 1..22: note = Synthetic construct
  source 1..22: mol_type = other DNA
cgatctattttattattcttcg

SEQ ID NO: 8630 - DNA, 22 bp, synthetic construct
  misc_feature 1..22: note = Synthetic construct
  source 1..22: mol_type = other DNA
gatctattttattattcttcgg

SEQ ID NO: 8631 - DNA, 22 bp, synthetic construct
  misc_feature 1..22: note = Synthetic construct
  source 1..22: mol_type = other DNA
atctattttattattcttcgga

SEQ ID NO: 8632 - DNA, 22 bp, synthetic construct
  misc_feature 1..22: note = Synthetic construct
  source 1..22: mol_type = other DNA
tctattttattattcttcggaa

SEQ ID NO: 8633 - DNA, 22 bp, synthetic construct
  misc_feature 1..22: note = Synthetic construct
  source 1..22: mol_type = other DNA
ctattttattattcttcggaac

SEQ ID NO: 8634 - DNA, 22 bp, synthetic construct
  misc_feature 1..22: note = Synthetic construct
  source 1..22: mol_type = other DNA
tattttattattcttcggaact

SEQ ID NO: 8635 - DNA, 22 bp, synthetic construct
  misc_feature 1..22: note = Synthetic construct
  source 1..22: mol_type = other DNA
attttattattcttcggaactg

SEQ ID NO: 8636 - DNA, 22 bp, synthetic construct
  misc_feature 1..22: note = Synthetic construct
  source 1..22: mol_type = other DNA
ttttattattcttcggaactgt

SEQ ID NO: 8637 - DNA, 22 bp, synthetic construct
  misc_feature 1..22: note = Synthetic construct
  source 1..22: mol_type = other DNA
tttattattcttcggaactgta

SEQ ID NO: 8638 - DNA, 22 bp, synthetic construct
  misc_feature 1..22: note = Synthetic construct
  source 1..22: mol_type = other DNA
ttattattcttcggaactgtaa

SEQ ID NO: 8639 - DNA, 22 bp, synthetic construct
  misc_feature 1..22: note = Synthetic construct
  source 1..22: mol_type = other DNA
tattattcttcggaactgtaaa

SEQ ID NO: 8640 - DNA, 22 bp, synthetic construct
  misc_feature 1..22: note = Synthetic construct
  source 1..22: mol_type = other DNA
attattcttcggaactgtaaac

SEQ ID NO: 8641 - DNA, 22 bp, synthetic construct
  misc_feature 1..22: note = Synthetic construct
  source 1..22: mol_type = other DNA
ttattcttcggaactgtaaaca

SEQ ID NO: 8642 - DNA, 22 bp, synthetic construct
  misc_feature 1..22: note = Synthetic construct
  source 1..22: mol_type = other DNA
tattcttcggaactgtaaacac

SEQ ID NO: 8643 - DNA, 22 bp, synthetic construct
  misc_feature 1..22: note = Synthetic construct
  source 1..22: mol_type = other DNA
attcttcggaactgtaaacact

SEQ ID NO: 8644 - DNA, 22 bp, synthetic construct
  misc_feature 1..22: note = Synthetic construct
  source 1..22: mol_type = other DNA
ttcttcggaactgtaaacactc

SEQ ID NO: 8645 - DNA, 22 bp, synthetic construct
  misc_feature 1..22: note = Synthetic construct
  source 1..22: mol_type = other DNA
tcttcggaactgtaaacactcc

SEQ ID NO: 8646 - DNA, 22 bp, synthetic construct
  misc_feature 1..22: note = Synthetic construct
  source 1..22: mol_type = other DNA
cttcggaactgtaaacactccg

SEQ ID NO: 8647 - DNA, 22 bp, synthetic construct
  misc_feature 1..22: note = Synthetic construct
  source 1..22: mol_type = other DNA
ttcggaactgtaaacactccgt

SEQ ID NO: 8648 - DNA, 22 bp, synthetic construct
  misc_feature 1..22: note = Synthetic construct
  source 1..22: mol_type = other DNA
tcggaactgtaaacactccgtt

SEQ ID NO: 8649 - DNA, 22 bp, synthetic construct
  misc_feature 1..22: note = Synthetic construct
  source 1..22: mol_type = other DNA
cggaactgtaaacactccgttc

SEQ ID NO: 8650 - DNA, 22 bp, synthetic construct
  misc_feature 1..22: note = Synthetic construct
  source 1..22: mol_type = other DNA
ggaactgtaaacactccgttcc

SEQ ID NO: 8651 - DNA, 22 bp, synthetic construct
  misc_feature 1..22: note = Synthetic construct
  source 1..22: mol_type = other DNA
gaactgtaaacactccgttccc

SEQ ID NO: 8652 - DNA, 22 bp, synthetic construct
  misc_feature 1..22: note = Synthetic construct
  source 1..22: mol_type = other DNA
aactgtaaacactccgttccct

SEQ ID NO: 8653 - DNA, 22 bp, synthetic construct
  misc_feature 1..22: note = Synthetic construct
  source 1..22: mol_type = other DNA
actgtaaacactccgttcccta

SEQ ID NO: 8654 - DNA, 22 bp, synthetic construct
  misc_feature 1..22: note = Synthetic construct
  source 1..22: mol_type = other DNA
ctgtaaacactccgttccctac

SEQ ID NO: 8655 - DNA, 22 bp, synthetic construct
  misc_feature 1..22: note = Synthetic construct
  source 1..22: mol_type = other DNA
tgtaaacactccgttccctaca

SEQ ID NO: 8656 - DNA, 22 bp, synthetic construct
  misc_feature 1..22: note = Synthetic construct
  source 1..22: mol_type = other DNA
gtaaacactccgttccctacaa

SEQ ID NO: 8657 - DNA, 22 bp, synthetic construct
  misc_feature 1..22: note = Synthetic construct
  source 1..22: mol_type = other DNA
taaacactccgttccctacaac

SEQ ID NO: 8658 - DNA, 22 bp, synthetic construct
  misc_feature 1..22: note = Synthetic construct
  source 1..22: mol_type = other DNA
aaacactccgttccctacaacg

SEQ ID NO: 8659 - DNA, 22 bp, synthetic construct
  misc_feature 1..22: note = Synthetic construct
  source 1..22: mol_type = other DNA
aacactccgttccctacaacga

SEQ ID NO: 8660 - DNA, 22 bp, synthetic construct
  misc_feature 1..22: note = Synthetic construct
  source 1..22: mol_type = other DNA
acactccgttccctacaacgag

SEQ ID NO: 8661 - DNA, 22 bp, synthetic construct
  misc_feature 1..22: note = Synthetic construct
  source 1..22: mol_type = other DNA
cactccgttccctacaacgagc

SEQ ID NO: 8662 - DNA, 22 bp, synthetic construct
  misc_feature 1..22: note = Synthetic construct
  source 1..22: mol_type = other DNA
actccgttccctacaacgagcc

SEQ ID NO: 8663 - DNA, 22 bp, synthetic construct
  misc_feature 1..22: note = Synthetic construct
  source 1..22: mol_type = other DNA
ctccgttccctacaacgagcct

SEQ ID NO: 8664 - DNA, 22 bp, synthetic construct
  misc_feature 1..22: note = Synthetic construct
  source 1..22: mol_type = other DNA
tccgttccctacaacgagccta

SEQ ID NO: 8665 - DNA, 22 bp, synthetic construct
  misc_feature 1..22: note = Synthetic construct
  source 1..22: mol_type = other DNA
ccgttccctacaacgagcctaa

SEQ ID NO: 8666 - DNA, 22 bp, synthetic construct
  misc_feature 1..22: note = Synthetic construct
  source 1..22: mol_type = other DNA
cgttccctacaacgagcctaaa

SEQ ID NO: 8667 - DNA, 22 bp, synthetic construct
  misc_feature 1..22: note = Synthetic construct
  source 1..22: mol_type = other DNA
gttccctacaacgagcctaaat

SEQ ID NO: 8668 - DNA, 22 bp, synthetic construct
  misc_feature 1..22: note = Synthetic construct
  source 1..22: mol_type = other DNA
ttccctacaacgagcctaaatt

SEQ ID NO: 8669 - DNA, 22 bp, synthetic construct
  misc_feature 1..22: note = Synthetic construct
  source 1..22: mol_type = other DNA
tccctacaacgagcctaaattc

SEQ ID NO: 8670 - DNA, 22 bp, synthetic construct
  misc_feature 1..22: note = Synthetic construct
  source 1..22: mol_type = other DNA
ccctacaacgagcctaaattca

SEQ ID NO: 8671 - DNA, 22 bp, synthetic construct
  misc_feature 1..22: note = Synthetic construct
  source 1..22: mol_type = other DNA
cctacaacgagcctaaattcat

SEQ ID NO: 8672 - DNA, 22 bp, synthetic construct
  misc_feature 1..22: note = Synthetic construct
  source 1..22: mol_type = other DNA
ctacaacgagcctaaattcata

SEQ ID NO: 8673 - DNA, 22 bp, synthetic construct
  misc_feature 1..22: note = Synthetic construct
  source 1..22: mol_type = other DNA
tacaacgagcctaaattcatat

SEQ ID NO: 8674 - DNA, 22 bp, synthetic construct
  misc_feature 1..22: note = Synthetic construct
  source 1..22: mol_type = other DNA
acaacgagcctaaattcatatg

SEQ ID NO: 8675 - DNA, 22 bp, synthetic construct
  misc_feature 1..22: note = Synthetic construct
  source 1..22: mol_type = other DNA
caacgagcctaaattcatatga

SEQ ID NO: 8676 - DNA, 22 bp, synthetic construct
  misc_feature 1..22: note = Synthetic construct
  source 1..22: mol_type = other DNA
aacgagcctaaattcatatgac

SEQ ID NO: 8677 - DNA, 22 bp, synthetic construct
  misc_feature 1..22: note = Synthetic construct
  source 1..22: mol_type = other DNA
acgagcctaaattcatatgact

SEQ ID NO: 8678 - DNA, 22 bp, synthetic construct
  misc_feature 1..22: note = Synthetic construct
  source 1..22: mol_type = other DNA
cgagcctaaattcatatgactc

SEQ ID NO: 8679 - DNA, 22 bp, synthetic construct
  misc_feature 1..22: note = Synthetic construct
  source 1..22: mol_type = other DNA
gagcctaaattcatatgactcg

SEQ ID NO: 8680 - DNA, 22 bp, synthetic construct
  misc_feature 1..22: note = Synthetic construct
  source 1..22: mol_type = other DNA
agcctaaattcatatgactcgt

SEQ ID NO: 8681 - DNA, 22 bp, synthetic construct
  misc_feature 1..22: note = Synthetic construct
  source 1..22: mol_type = other DNA
gcctaaattcatatgactcgtt

SEQ ID NO: 8682 - DNA, 22 bp, synthetic construct
  misc_feature 1..22: note = Synthetic construct
  source 1..22: mol_type = other DNA
cctaaattcatatgactcgtta

SEQ ID NO: 8683 - DNA, 22 bp, synthetic construct
  misc_feature 1..22: note = Synthetic construct
  source 1..22: mol_type = other DNA
ctaaattcatatgactcgttat

SEQ ID NO: 8684 - DNA, 22 bp, synthetic construct
  misc_feature 1..22: note = Synthetic construct
  source 1..22: mol_type = other DNA
taaattcatatgactcgttata

SEQ ID NO: 8685 - DNA, 22 bp, synthetic construct
  misc_feature 1..22: note = Synthetic construct
  source 1..22: mol_type = other DNA
aaattcatatgactcgttatag

SEQ ID NO: 8686 - DNA, 22 bp, synthetic construct
  misc_feature 1..22: note = Synthetic construct
  source 1..22: mol_type = other DNA
aattcatatgactcgttatagc

SEQ ID NO: 8687 - DNA, 22 bp, synthetic construct
  misc_feature 1..22: note = Synthetic construct
  source 1..22: mol_type = other DNA
attcatatgactcgttatagcg

SEQ ID NO: 8688 - DNA, 22 bp, synthetic construct
  misc_feature 1..22: note = Synthetic construct
  source 1..22: mol_type = other DNA
ttcatatgactcgttatagcgg

SEQ ID NO: 8689 - DNA, 22 bp, synthetic construct
  misc_feature 1..22: note = Synthetic construct
  source 1..22: mol_type = other DNA
tcatatgactcgttatagcgga

SEQ ID NO: 8690 - DNA, 22 bp, synthetic construct
  misc_feature 1..22: note = Synthetic construct
  source 1..22: mol_type = other DNA
catatgactcgttatagcggac

SEQ ID NO: 8691 - DNA, 22 bp, synthetic construct
  misc_feature 1..22: note = Synthetic construct
  source 1..22: mol_type = other DNA
atatgactcgttatagcggacc

SEQ ID NO: 8692 - DNA, 22 bp, synthetic construct
  misc_feature 1..22: note = Synthetic construct
  source 1..22: mol_type = other DNA
tatgactcgttatagcggaccg

SEQ ID NO: 8693 - DNA, 22 bp, synthetic construct
  misc_feature 1..22: note = Synthetic construct
  source 1..22: mol_type = other DNA
atgactcgttatagcggaccgc

SEQ ID NO: 8694 - DNA, 22 bp, synthetic construct
  misc_feature 1..22: note = Synthetic construct
  source 1..22: mol_type = other DNA
tgactcgttatagcggaccgcg

SEQ ID NO: 8695 - DNA, 22 bp, synthetic construct
  misc_feature 1..22: note = Synthetic construct
  source 1..22: mol_type = other DNA
gactcgttatagcggaccgcgt

SEQ ID NO: 8696 - DNA, 22 bp, synthetic construct
  misc_feature 1..22: note = Synthetic construct
  source 1..22: mol_type = other DNA
actcgttatagcggaccgcgtg

SEQ ID NO: 8697 - DNA, 22 bp, synthetic construct
  misc_feature 1..22: note = Synthetic construct
  source 1..22: mol_type = other DNA
ctcgttatagcggaccgcgtgt

SEQ ID NO: 8698 - DNA, 22 bp, synthetic construct
  misc_feature 1..22: note = Synthetic construct
  source 1..22: mol_type = other DNA
tcgttatagcggaccgcgtgtc

SEQ ID NO: 8699 - DNA, 22 bp, synthetic construct
  misc_feature 1..22: note = Synthetic construct
  source 1..22: mol_type = other DNA
cgttatagcggaccgcgtgtct

SEQ ID NO: 8700 - DNA, 22 bp, synthetic construct
  misc_feature 1..22: note = Synthetic construct
  source 1..22: mol_type = other DNA
gttatagcggaccgcgtgtctg

SEQ ID NO: 8701 - DNA, 22 bp, synthetic construct
  misc_feature 1..22: note = Synthetic construct
  source 1..22: mol_type = other DNA
ttatagcggaccgcgtgtctga

SEQ ID NO: 8702 - DNA, 22 bp, synthetic construct
  misc_feature 1..22: note = Synthetic construct
  source 1..22: mol_type = other DNA
tatagcggaccgcgtgtctgat

SEQ ID NO: 8703 - DNA, 22 bp, synthetic construct
  misc_feature 1..22: note = Synthetic construct
  source 1..22: mol_type = other DNA
atagcggaccgcgtgtctgatc

SEQ ID NO: 8704 - DNA, 22 bp, synthetic construct
  misc_feature 1..22: note = Synthetic construct
  source 1..22: mol_type = other DNA
tagcggaccgcgtgtctgatcc

SEQ ID NO: 8705 - DNA, 22 bp, synthetic construct
  misc_feature 1..22: note = Synthetic construct
  source 1..22: mol_type = other DNA
agcggaccgcgtgtctgatcca

SEQ ID NO: 8706 - DNA, 22 bp, synthetic construct
  misc_feature 1..22: note = Synthetic construct
  source 1..22: mol_type = other DNA
gcggaccgcgtgtctgatccac

SEQ ID NO: 8707 - DNA, 22 bp, synthetic construct
  misc_feature 1..22: note = Synthetic construct
  source 1..22: mol_type = other DNA
cggaccgcgtgtctgatccacg

SEQ ID NO: 8708 - DNA, 22 bp, synthetic construct
  misc_feature 1..22: note = Synthetic construct
  source 1..22: mol_type = other DNA
ggaccgcgtgtctgatccacgg

SEQ ID NO: 8709 - DNA, 22 bp, synthetic construct
  misc_feature 1..22: note = Synthetic construct
  source 1..22: mol_type = other DNA
gaccgcgtgtctgatccacggc

SEQ ID NO: 8710 - DNA, 22 bp, synthetic construct
  misc_feature 1..22: note = Synthetic construct
  source 1..22: mol_type = other DNA
accgcgtgtctgatccacggcg

SEQ ID NO: 8711 - DNA, 22 bp, synthetic construct
  misc_feature 1..22: note = Synthetic construct
  source 1..22: mol_type = other DNA
ccgcgtgtctgatccacggcgc

SEQ ID NO: 8712 - DNA, 22 bp, synthetic construct
  misc_feature 1..22: note = Synthetic construct
  source 1..22: mol_type = other DNA
cgcgtgtctgatccacggcgca

SEQ ID NO: 8713 - DNA, 22 bp, synthetic construct
  misc_feature 1..22: note = Synthetic construct
  source 1..22: mol_type = other DNA
gcgtgtctgatccacggcgcac

SEQ ID NO: 8714 - DNA, 22 bp, synthetic construct
  misc_feature 1..22: note = Synthetic construct
  source 1..22: mol_type = other DNA
cgtgtctgatccacggcgcaca

SEQ ID NO: 8715 - DNA, 22 bp, synthetic construct
  misc_feature 1..22: note = Synthetic construct
  source 1..22: mol_type = other DNA
gtgtctgatccacggcgcacat

SEQ ID NO: 8716 - DNA, 22 bp, synthetic construct
  misc_feature 1..22: note = Synthetic construct
  source 1..22: mol_type = other DNA
tgtctgatccacggcgcacatt

SEQ ID NO: 8717 - DNA, 22 bp, synthetic construct
  misc_feature 1..22: note = Synthetic construct
  source 1..22: mol_type = other DNA
gtctgatccacggcgcacattg

SEQ ID NO: 8718 - DNA, 22 bp, synthetic construct
  misc_feature 1..22: note = Synthetic construct
  source 1..22: mol_type = other DNA
tctgatccacggcgcacattgg

SEQ ID NO: 8719 - DNA, 22 bp, synthetic construct
  misc_feature 1..22: note = Synthetic construct
  source 1..22: mol_type = other DNA
ctgatccacggcgcacattggt

SEQ ID NO: 8720 - DNA, 22 bp, synthetic construct
  misc_feature 1..22: note = Synthetic construct
  source 1..22: mol_type = other DNA
tgatccacggcgcacattggtc

SEQ ID NO: 8721 - DNA, 22 bp, synthetic construct
  misc_feature 1..22: note = Synthetic construct
  source 1..22: mol_type = other DNA
gatccacggcgcacattggtct

SEQ ID NO: 8722 - DNA, 22 bp, synthetic construct
  misc_feature 1..22: note = Synthetic construct
  source 1..22: mol_type = other DNA
atccacggcgcacattggtctc

SEQ ID NO: 8723 - DNA, 22 bp, synthetic construct
  misc_feature 1..22: note = Synthetic construct
  source 1..22: mol_type = other DNA
tccacggcgcacattggtctcg

SEQ ID NO: 8724 - DNA, 22 bp, synthetic construct
  misc_feature 1..22: note = Synthetic construct
  source 1..22: mol_type = other DNA
ccacggcgcacattggtctcgg

SEQ ID NO: 8725 - DNA, 22 bp, synthetic construct
  misc_feature 1..22: note = Synthetic construct
  source 1..22: mol_type = other DNA
cacggcgcacattggtctcgga

SEQ ID NO: 8726 - DNA, 22 bp, synthetic construct
  misc_feature 1..22: note = Synthetic construct
  source 1..22: mol_type = other DNA
acggcgcacattggtctcggac

SEQ ID NO: 8727 - DNA, 22 bp, synthetic construct
  misc_feature 1..22: note = Synthetic construct
  source 1..22: mol_type = other DNA
cggcgcacattggtctcggacc

SEQ ID NO: 8728 - DNA, 22 bp, synthetic construct
  misc_feature 1..22: note = Synthetic construct
  source 1..22: mol_type = other DNA
ggcgcacattggtctcggacca

SEQ ID NO: 8729 - DNA, 22 bp, synthetic construct
  misc_feature 1..22: note = Synthetic construct
  source 1..22: mol_type = other DNA
gcgcacattggtctcggaccaa

SEQ ID NO: 8730 - DNA, 22 bp, synthetic construct
  misc_feature 1..22: note = Synthetic construct
  source 1..22: mol_type = other DNA
cgcacattggtctcggaccaat

SEQ ID NO: 8731 - DNA, 22 bp, synthetic construct
  misc_feature 1..22: note = Synthetic construct
  source 1..22: mol_type = other DNA
gcacattggtctcggaccaata

SEQ ID NO: 8732 - DNA, 22 bp, synthetic construct
  misc_feature 1..22: note = Synthetic construct
  source 1..22: mol_type = other DNA
cacattggtctcggaccaatag

SEQ ID NO: 8733 - DNA, 22 bp, synthetic construct
  misc_feature 1..22: note = Synthetic construct
  source 1..22: mol_type = other DNA
acattggtctcggaccaataga

SEQ ID NO: 8734 - DNA, 22 bp, synthetic construct
  misc_feature 1..22: note = Synthetic construct
  source 1..22: mol_type = other DNA
cattggtctcggaccaatagag

SEQ ID NO: 8735 - DNA, 22 bp, synthetic construct
  misc_feature 1..22: note = Synthetic construct
  source 1..22: mol_type = other DNA
attggtctcggaccaatagagc

SEQ ID NO: 8736 - DNA, 22 bp, synthetic construct
  misc_feature 1..22: note = Synthetic construct
  source 1..22: mol_type = other DNA
ttggtctcggaccaatagagcc

SEQ ID NO: 8737 - DNA, 22 bp, synthetic construct
  misc_feature 1..22: note = Synthetic construct
  source 1..22: mol_type = other DNA
tggtctcggaccaatagagccg

SEQ ID NO: 8738 - DNA, 22 bp, synthetic construct
  misc_feature 1..22: note = Synthetic construct
  source 1..22: mol_type = other DNA
ggtctcggaccaatagagccgc

SEQ ID NO: 8739 - DNA, 22 bp, synthetic construct
  misc_feature 1..22: note = Synthetic construct
  source 1..22: mol_type = other DNA
gtctcggaccaatagagccgct

SEQ ID NO: 8740 - DNA, 22 bp, synthetic construct
  misc_feature 1..22: note = Synthetic construct
  source 1..22: mol_type = other DNA
tctcggaccaatagagccgctc

SEQ ID NO: 8741 - DNA, 22 bp, synthetic construct
  misc_feature 1..22: note = Synthetic construct
  source 1..22: mol_type = other DNA
ctcggaccaatagagccgctct

SEQ ID NO: 8742 - DNA, 22 bp, synthetic construct
  misc_feature 1..22: note = Synthetic construct
  source 1..22: mol_type = other DNA
tcggaccaatagagccgctctc

SEQ ID NO: 8743 - DNA, 22 bp, synthetic construct
  misc_feature 1..22: note = Synthetic construct
  source 1..22: mol_type = other DNA
cggaccaatagagccgctctca

SEQ ID NO: 8744 - DNA, 22 bp, synthetic construct
  misc_feature 1..22: note = Synthetic construct
  source 1..22: mol_type = other DNA
ggaccaatagagccgctctcag

SEQ ID NO: 8745 - DNA, 22 bp, synthetic construct
  misc_feature 1..22: note = Synthetic construct
  source 1..22: mol_type = other DNA
gaccaatagagccgctctcaga

SEQ ID NO: 8746 - DNA, 22 bp, synthetic construct
  misc_feature 1..22: note = Synthetic construct
  source 1..22: mol_type = other DNA
accaatagagccgctctcagag

SEQ ID NO: 8747 - DNA, 22 bp, synthetic construct
  misc_feature 1..22: note = Synthetic construct
  source 1..22: mol_type = other DNA
ccaatagagccgctctcagagc

SEQ ID NO: 8748 - DNA, 22 bp, synthetic construct
  misc_feature 1..22: note = Synthetic construct
  source 1..22: mol_type = other DNA
caatagagccgctctcagagcg

SEQ ID NO: 8749 - DNA, 22 bp, synthetic construct
  misc_feature 1..22: note = Synthetic construct
  source 1..22: mol_type = other DNA
aatagagccgctctcagagcgc

SEQ ID NO: 8750 - DNA, 22 bp, synthetic construct
  misc_feature 1..22: note = Synthetic construct
  source 1..22: mol_type = other DNA
atagagccgctctcagagcgcg

SEQ ID NO: 8751 - DNA, 22 bp, synthetic construct
  misc_feature 1..22: note = Synthetic construct
  source 1..22: mol_type = other DNA
tagagccgctctcagagcgcgg

SEQ ID NO: 8752 - DNA, 22 bp, synthetic construct
  misc_feature 1..22: note = Synthetic construct
  source 1..22: mol_type = other DNA
agagccgctctcagagcgcggg

SEQ ID NO: 8753 - DNA, 22 bp, synthetic construct
  misc_feature 1..22: note = Synthetic construct
  source 1..22: mol_type = other DNA
gagccgctctcagagcgcgggg

SEQ ID NO: 8754 - DNA, 22 bp, synthetic construct
  misc_feature 1..22: note = Synthetic construct
  source 1..22: mol_type = other DNA
agccgctctcagagcgcggggg

SEQ ID NO: 8755 - DNA, 22 bp, synthetic construct
  misc_feature 1..22: note = Synthetic construct
  source 1..22: mol_type = other DNA
gccgctctcagagcgcgggggg

SEQ ID NO: 8756 - DNA, 22 bp, synthetic construct
  misc_feature 1..22: note = Synthetic construct
  source 1..22: mol_type = other DNA
ccgctctcagagcgcggggggt

SEQ ID NO: 8757 - DNA, 22 bp, synthetic construct
  misc_feature 1..22: note = Synthetic construct
  source 1..22: mol_type = other DNA
cgctctcagagcgcggggggta

SEQ ID NO: 8758 - DNA, 22 bp, synthetic construct
  misc_feature 1..22: note = Synthetic construct
  source 1..22: mol_type = other DNA
gctctcagagcgcggggggtaa

SEQ ID NO: 8759 - DNA, 22 bp, synthetic construct
  misc_feature 1..22: note = Synthetic construct
  source 1..22: mol_type = other DNA
ctctcagagcgcggggggtaac

SEQ ID NO: 8760 - DNA, 22 bp, synthetic construct
  misc_feature 1..22: note = Synthetic construct
  source 1..22: mol_type = other DNA
tctcagagcgcggggggtaacg

SEQ ID NO: 8761 - DNA, 22 bp, synthetic construct
  misc_feature 1..22: note = Synthetic construct
  source 1..22: mol_type = other DNA
ctcagagcgcggggggtaacgg

SEQ ID NO: 8762 - DNA, 22 bp, synthetic construct
  misc_feature 1..22: note = Synthetic construct
  source 1..22: mol_type = other DNA
tcagagcgcggggggtaacggt

SEQ ID NO: 8763 - DNA, 22 bp, synthetic construct
  misc_feature 1..22: note = Synthetic construct
  source 1..22: mol_type = other DNA
cagagcgcggggggtaacggtt

SEQ ID NO: 8764 - DNA, 22 bp, synthetic construct
  misc_feature 1..22: note = Synthetic construct
  source 1..22: mol_type = other DNA
agagcgcggggggtaacggttg

SEQ ID NO: 8765 - DNA, 22 bp, synthetic construct
  misc_feature 1..22: note = Synthetic construct
  source 1..22: mol_type = other DNA
gagcgcggggggtaacggttgc

SEQ ID NO: 8766 - DNA, 22 bp, synthetic construct
  misc_feature 1..22: note = Synthetic construct
  source 1..22: mol_type = other DNA
agcgcggggggtaacggttgct

SEQ ID NO: 8767 - DNA, 22 bp, synthetic construct
  misc_feature 1..22: note = Synthetic construct
  source 1..22: mol_type = other DNA
gcgcggggggtaacggttgctt

SEQ ID NO: 8768 - DNA, 22 bp, synthetic construct
  misc_feature 1..22: note = Synthetic construct
  source 1..22: mol_type = other DNA
cgcggggggtaacggttgcttg

SEQ ID NO: 8769 - DNA, 22 bp, synthetic construct
  misc_feature 1..22: note = Synthetic construct
  source 1..22: mol_type = other DNA
gcggggggtaacggttgcttgt

SEQ ID NO: 8770 - DNA, 22 bp, synthetic construct
  misc_feature 1..22: note = Synthetic construct
  source 1..22: mol_type = other DNA
cggggggtaacggttgcttgtt

SEQ ID NO: 8771 - DNA, 22 bp, synthetic construct
  misc_feature 1..22: note = Synthetic construct
  source 1..22: mol_type = other DNA
ggggggtaacggttgcttgttc

SEQ ID NO: 8772 - DNA, 22 bp, synthetic construct
  misc_feature 1..22: note = Synthetic construct
  source 1..22: mol_type = other DNA
gggggtaacggttgcttgttca

SEQ ID NO: 8773 - DNA, 22 bp, synthetic construct
  misc_feature 1..22: note = Synthetic construct
  source 1..22: mol_type = other DNA
ggggtaacggttgcttgttcag

SEQ ID NO: 8774 - DNA, 22 bp, synthetic construct
  misc_feature 1..22: note = Synthetic construct
  source 1..22: mol_type = other DNA
gggtaacggttgcttgttcagc

SEQ ID NO: 8775 - DNA, 22 bp, synthetic construct
  misc_feature 1..22: note = Synthetic construct
  source 1..22: mol_type = other DNA
ggtaacggttgcttgttcagcg

SEQ ID NO: 8776 - DNA, 22 bp, synthetic construct
  misc_feature 1..22: note = Synthetic construct
  source 1..22: mol_type = other DNA
gtaacggttgcttgttcagcga

SEQ ID NO: 8777 - DNA, 22 bp, synthetic construct
  misc_feature 1..22: note = Synthetic construct
  source 1..22: mol_type = other DNA
taacggttgcttgttcagcgaa

SEQ ID NO: 8778 - DNA, 22 bp, synthetic construct
  misc_feature 1..22: note = Synthetic construct
  source 1..22: mol_type = other DNA
aacggttgcttgttcagcgaac

SEQ ID NO: 8779 - DNA, 22 bp, synthetic construct
  misc_feature 1..22: note = Synthetic construct
  source 1..22: mol_type = other DNA
acggttgcttgttcagcgaact

SEQ ID NO: 8780 - DNA, 22 bp, synthetic construct
  misc_feature 1..22: note = Synthetic construct
  source 1..22: mol_type = other DNA
cggttgcttgttcagcgaactt

SEQ ID NO: 8781 - DNA, 22 bp, synthetic construct
  misc_feature 1..22: note = Synthetic construct
  source 1..22: mol_type = other DNA
ggttgcttgttcagcgaacttc

SEQ ID NO: 8782 - DNA, 22 bp, synthetic construct
  misc_feature 1..22: note = Synthetic construct
  source 1..22: mol_type = other DNA
gttgcttgttcagcgaacttct

SEQ ID NO: 8783 - DNA, 22 bp, synthetic construct
  misc_feature 1..22: note = Synthetic construct
  source 1..22: mol_type = other DNA
ttgcttgttcagcgaacttctt

SEQ ID NO: 8784 - DNA, 22 bp, synthetic construct
  misc_feature 1..22: note = Synthetic construct
  source 1..22: mol_type = other DNA
tgcttgttcagcgaacttcttg

SEQ ID NO: 8785 - DNA, 22 bp, synthetic construct
  misc_feature 1..22: note = Synthetic construct
  source 1..22: mol_type = other DNA
gcttgttcagcgaacttcttgt

SEQ ID NO: 8786 - DNA, 22 bp, synthetic construct
  misc_feature 1..22: note = Synthetic construct
  source 1..22: mol_type = other DNA
cttgttcagcgaacttcttgta

SEQ ID NO: 8787 - DNA, 22 bp, synthetic construct
  misc_feature 1..22: note = Synthetic construct
  source 1..22: mol_type = other DNA
ttgttcagcgaacttcttgtaa

SEQ ID NO: 8788 - DNA, 22 bp, synthetic construct
  misc_feature 1..22: note = Synthetic construct
  source 1..22: mol_type = other DNA
tgttcagcgaacttcttgtaag

SEQ ID NO: 8789 - DNA, 22 bp, synthetic construct
  misc_feature 1..22: note = Synthetic construct
  source 1..22: mol_type = other DNA
gttcagcgaacttcttgtaagg

SEQ ID NO: 8790 - DNA, 22 bp, synthetic construct
  misc_feature 1..22: note = Synthetic construct
  source 1..22: mol_type = other DNA
ttcagcgaacttcttgtaaggc

SEQ ID NO: 8791 - DNA, 22 bp, synthetic construct
  misc_feature 1..22: note = Synthetic construct
  source 1..22: mol_type = other DNA
tcagcgaacttcttgtaaggcg

SEQ ID NO: 8792 - DNA, 22 bp, synthetic construct
  misc_feature 1..22: note = Synthetic construct
  source 1..22: mol_type = other DNA
cagcgaacttcttgtaaggcgc

SEQ ID NO: 8793 - DNA, 22 bp, synthetic construct
  misc_feature 1..22: note = Synthetic construct
  source 1..22: mol_type = other DNA
agcgaacttcttgtaaggcgct

SEQ ID NO: 8794 - DNA, 22 bp, synthetic construct
  misc_feature 1..22: note = Synthetic construct
  source 1..22: mol_type = other DNA
gcgaacttcttgtaaggcgctg

SEQ ID NO: 8795 - DNA, 22 bp, synthetic construct
  misc_feature 1..22: note = Synthetic construct
  source 1..22: mol_type = other DNA
cgaacttcttgtaaggcgctgc

SEQ ID NO: 8796 - DNA, 22 bp, synthetic construct
  misc_feature 1..22: note = Synthetic construct
  source 1..22: mol_type = other DNA
gaacttcttgtaaggcgctgca

SEQ ID NO: 8797 - DNA, 22 bp, synthetic construct
  misc_feature 1..22: note = Synthetic construct
  source 1..22: mol_type = other DNA
aacttcttgtaaggcgctgcat

SEQ ID NO: 8798 - DNA, 22 bp, synthetic construct
  misc_feature 1..22: note = Synthetic construct
  source 1..22: mol_type = other DNA
acttcttgtaaggcgctgcatc

SEQ ID NO: 8799 - DNA, 22 bp, synthetic construct
  misc_feature 1..22: note = Synthetic construct
  source 1..22: mol_type = other DNA
cttcttgtaaggcgctgcatcc

SEQ ID NO: 8800 - DNA, 22 bp, synthetic construct
  misc_feature 1..22: note = Synthetic construct
  source 1..22: mol_type = other DNA
ttcttgtaaggcgctgcatcct

SEQ ID NO: 8801 - DNA, 22 bp, synthetic construct
  misc_feature 1..22: note = Synthetic construct
  source 1..22: mol_type = other DNA
tcttgtaaggcgctgcatcctg

SEQ ID NO: 8802 - DNA, 22 bp, synthetic construct
  misc_feature 1..22: note = Synthetic construct
  source 1..22: mol_type = other DNA
cttgtaaggcgctgcatcctgc

SEQ ID NO: 8803 - DNA, 22 bp, synthetic construct
  misc_feature 1..22: note = Synthetic construct
  source 1..22: mol_type = other DNA
ttgtaaggcgctgcatcctgca

SEQ ID NO: 8804 - DNA, 22 bp, synthetic construct
  misc_feature 1..22: note = Synthetic construct
  source 1..22: mol_type = other DNA
tgtaaggcgctgcatcctgcaa

SEQ ID NO: 8805 - DNA, 22 bp, synthetic construct
  misc_feature 1..22: note = Synthetic construct
  source 1..22: mol_type = other DNA
gtaaggcgctgcatcctgcaac

SEQ ID NO: 8806 - DNA, 22 bp, synthetic construct
  misc_feature 1..22: note = Synthetic construct
  source 1..22: mol_type = other DNA
taaggcgctgcatcctgcaact

SEQ ID NO: 8807 - DNA, 22 bp, synthetic construct
  misc_feature 1..22: note = Synthetic construct
  source 1..22: mol_type = other DNA
aaggcgctgcatcctgcaactt

SEQ ID NO: 8808 - DNA, 22 bp, synthetic construct
  misc_feature 1..22: note = Synthetic construct
  source 1..22: mol_type = other DNA
aggcgctgcatcctgcaacttg

SEQ ID NO: 8809 - DNA, 22 bp, synthetic construct
  misc_feature 1..22: note = Synthetic construct
  source 1..22: mol_type = other DNA
ggcgctgcatcctgcaacttgt

SEQ ID NO: 8810 - DNA, 22 bp, synthetic construct
  misc_feature 1..22: note = Synthetic construct
  source 1..22: mol_type = other DNA
gcgctgcatcctgcaacttgtg

SEQ ID NO: 8811 - DNA, 22 bp, synthetic construct
  misc_feature 1..22: note = Synthetic construct
  source 1..22: mol_type = other DNA
cgctgcatcctgcaacttgtgc

SEQ ID NO: 8812 - DNA, 22 bp, synthetic construct
  misc_feature 1..22: note = Synthetic construct
  source 1..22: mol_type = other DNA
gctgcatcctgcaacttgtgcc

SEQ ID NO: 8813 - DNA, 22 bp, synthetic construct
  misc_feature 1..22: note = Synthetic construct
  source 1..22: mol_type = other DNA
ctgcatcctgcaacttgtgccc

SEQ ID NO: 8814 - DNA, 22 bp, synthetic construct
  misc_feature 1..22: note = Synthetic construct
  source 1..22: mol_type = other DNA
tgcatcctgcaacttgtgcccc

SEQ ID NO: 8815 - DNA, 22 bp, synthetic construct
  misc_feature 1..22: note = Synthetic construct
  source 1..22: mol_type = other DNA
gcatcctgcaacttgtgcccca

SEQ ID NO: 8816 - DNA, 22 bp, synthetic construct
  misc_feature 1..22: note = Synthetic construct
  source 1..22: mol_type = other DNA
catcctgcaacttgtgccccat

SEQ ID NO: 8817 - DNA, 22 bp, synthetic construct
  misc_feature 1..22: note = Synthetic construct
  source 1..22: mol_type = other DNA
atcctgcaacttgtgccccata

SEQ ID NO: 8818 - DNA, 22 bp, synthetic construct
  misc_feature 1..22: note = Synthetic construct
  source 1..22: mol_type = other DNA
tcctgcaacttgtgccccatag

SEQ ID NO: 8819 - DNA, 22 bp, synthetic construct
  misc_feature 1..22: note = Synthetic construct
  source 1..22: mol_type = other DNA
cctgcaacttgtgccccatagg

SEQ ID NO: 8820 - DNA, 22 bp, synthetic construct
  misc_feature 1..22: note = Synthetic construct
  source 1..22: mol_type = other DNA
ctgcaacttgtgccccatagga

SEQ ID NO: 8821 - DNA, 22 bp, synthetic construct
  misc_feature 1..22: note = Synthetic construct
  source 1..22: mol_type = other DNA
tgcaacttgtgccccataggag

SEQ ID NO: 8822 - DNA, 22 bp, synthetic construct
  misc_feature 1..22: note = Synthetic construct
  source 1..22: mol_type = other DNA
gcaacttgtgccccataggagc

SEQ ID NO: 8823 - DNA, 22 bp, synthetic construct
  misc_feature 1..22: note = Synthetic construct
  source 1..22: mol_type = other DNA
caacttgtgccccataggagca

SEQ ID NO: 8824 - DNA, 22 bp, synthetic construct
  misc_feature 1..22: note = Synthetic construct
  source 1..22: mol_type = other DNA
aacttgtgccccataggagcac

SEQ ID NO: 8825 - DNA, 22 bp, synthetic construct
  misc_feature 1..22: note = Synthetic construct
  source 1..22: mol_type = other DNA
acttgtgccccataggagcacc

SEQ ID NO: 8826 - DNA, 22 bp, synthetic construct
  misc_feature 1..22: note = Synthetic construct
  source 1..22: mol_type = other DNA
cttgtgccccataggagcaccg

SEQ ID NO: 8827 - DNA, 22 bp, synthetic construct
  misc_feature 1..22: note = Synthetic construct
  source 1..22: mol_type = other DNA
ttgtgccccataggagcaccgt

SEQ ID NO: 8828 - DNA, 22 bp, synthetic construct
  misc_feature 1..22: note = Synthetic construct
  source 1..22: mol_type = other DNA
tgtgccccataggagcaccgtt

SEQ ID NO: 8829 - DNA, 22 bp, synthetic construct
  misc_feature 1..22: note = Synthetic construct
  source 1..22: mol_type = other DNA
gtgccccataggagcaccgttg

SEQ ID NO: 8830 - DNA, 22 bp, synthetic construct
  misc_feature 1..22: note = Synthetic construct
  source 1..22: mol_type = other DNA
tgccccataggagcaccgttgg

SEQ ID NO: 8831 - DNA, 22 bp, synthetic construct
  misc_feature 1..22: note = Synthetic construct
  source 1..22: mol_type = other DNA
gccccataggagcaccgttgga

SEQ ID NO: 8832 - DNA, 22 bp, synthetic construct
  misc_feature 1..22: note = Synthetic construct
  source 1..22: mol_type = other DNA
ccccataggagcaccgttggag

SEQ ID NO: 8833 - DNA, 22 bp, synthetic construct
  misc_feature 1..22: note = Synthetic construct
  source 1..22: mol_type = other DNA
cccataggagcaccgttggaga

SEQ ID NO: 8834 - DNA, 22 bp, synthetic construct
  misc_feature 1..22: note = Synthetic construct
  source 1..22: mol_type = other DNA
ccataggagcaccgttggagaa

SEQ ID NO: 8835 - DNA, 22 bp, synthetic construct
  misc_feature 1..22: note = Synthetic construct
  source 1..22: mol_type = other DNA
cataggagcaccgttggagaac

SEQ ID NO: 8836 - DNA, 22 bp, synthetic construct
  misc_feature 1..22: note = Synthetic construct
  source 1..22: mol_type = other DNA
ataggagcaccgttggagaacg

SEQ ID NO: 8837 - DNA, 22 bp, synthetic construct
  misc_feature 1..22: note = Synthetic construct
  source 1..22: mol_type = other DNA
taggagcaccgttggagaacgt

SEQ ID NO: 8838 - DNA, 22 bp, synthetic construct
  misc_feature 1..22: note = Synthetic construct
  source 1..22: mol_type = other DNA
aggagcaccgttggagaacgtg

SEQ ID NO: 8839 - DNA, 22 bp, synthetic construct
  misc_feature 1..22: note = Synthetic construct
  source 1..22: mol_type = other DNA
ggagcaccgttggagaacgtgc

SEQ ID NO: 8840 - DNA, 22 bp, synthetic construct
  misc_feature 1..22: note = Synthetic construct
  source 1..22: mol_type = other DNA
gagcaccgttggagaacgtgca

SEQ ID NO: 8841 - DNA, 22 bp, synthetic construct
  misc_feature 1..22: note = Synthetic construct
  source 1..22: mol_type = other DNA
agcaccgttggagaacgtgcat

SEQ ID NO: 8842 - DNA, 22 bp, synthetic construct
  misc_feature 1..22: note = Synthetic construct
  source 1..22: mol_type = other DNA
gcaccgttggagaacgtgcatt

SEQ ID NO: 8843 - DNA, 22 bp, synthetic construct
  misc_feature 1..22: note = Synthetic construct
  source 1..22: mol_type = other DNA
caccgttggagaacgtgcattg

SEQ ID NO: 8844 - DNA, 22 bp, synthetic construct
  misc_feature 1..22: note = Synthetic construct
  source 1..22: mol_type = other DNA
accgttggagaacgtgcattgc

SEQ ID NO: 8845 - DNA, 22 bp, synthetic construct
  misc_feature 1..22: note = Synthetic construct
  source 1..22: mol_type = other DNA
ccgttggagaacgtgcattgcc

SEQ ID NO: 8846 - DNA, 22 bp, synthetic construct
  misc_feature 1..22: note = Synthetic construct
  source 1..22: mol_type = other DNA
cgttggagaacgtgcattgccc

SEQ ID NO: 8847 - DNA, 22 bp, synthetic construct
  misc_feature 1..22: note = Synthetic construct
  source 1..22: mol_type = other DNA
gttggagaacgtgcattgccca

SEQ ID NO: 8848 - DNA, 22 bp, synthetic construct
  misc_feature 1..22: note = Synthetic construct
  source 1..22: mol_type = other DNA
ttggagaacgtgcattgcccaa

SEQ ID NO: 8849 - DNA, 22 bp, synthetic construct
  misc_feature 1..22: note = Synthetic construct
  source 1..22: mol_type = other DNA
tggagaacgtgcattgcccaaa

SEQ ID NO: 8850 - DNA, 22 bp, synthetic construct
  misc_feature 1..22: note = Synthetic construct
  source 1..22: mol_type = other DNA
ggagaacgtgcattgcccaaac

SEQ ID NO: 8851 - DNA, 22 bp, synthetic construct
  misc_feature 1..22: note = Synthetic construct
  source 1..22: mol_type = other DNA
gagaacgtgcattgcccaaaca

SEQ ID NO: 8852 - DNA, 22 bp, synthetic construct
  misc_feature 1..22: note = Synthetic construct
  source 1..22: mol_type = other DNA
agaacgtgcattgcccaaacaa

SEQ ID NO: 8853 - DNA, 22 bp, synthetic construct
  misc_feature 1..22: note = Synthetic construct
  source 1..22: mol_type = other DNA
gaacgtgcattgcccaaacaac

SEQ ID NO: 8854 - DNA, 22 bp, synthetic construct
  misc_feature 1..22: note = Synthetic construct
  source 1..22: mol_type = other DNA
aacgtgcattgcccaaacaacg

SEQ ID NO: 8855 - DNA, 22 bp, synthetic construct
  misc_feature 1..22: note = Synthetic construct
  source 1..22: mol_type = other DNA
acgtgcattgcccaaacaacga

SEQ ID NO: 8856 - DNA, 22 bp, synthetic construct
  misc_feature 1..22: note = Synthetic construct
  source 1..22: mol_type = other DNA
cgtgcattgcccaaacaacgac

SEQ ID NO: 8857 - DNA, 22 bp, synthetic construct
  misc_feature 1..22: note = Synthetic construct
  source 1..22: mol_type = other DNA
gtgcattgcccaaacaacgacg

SEQ ID NO: 8858 - DNA, 22 bp, synthetic construct
  misc_feature 1..22: note = Synthetic construct
  source 1..22: mol_type = other DNA
tgcattgcccaaacaacgacga

SEQ ID NO: 8859 - DNA, 22 bp, synthetic construct
  misc_feature 1..22: note = Synthetic construct
  source 1..22: mol_type = other DNA
gcattgcccaaacaacgacgat

SEQ ID NO: 8860 - DNA, 22 bp, synthetic construct
  misc_feature 1..22: note = Synthetic construct
  source 1..22: mol_type = other DNA
cattgcccaaacaacgacgatc

SEQ ID NO: 8861 - DNA, 22 bp, synthetic construct
  misc_feature 1..22: note = Synthetic construct
  source 1..22: mol_type = other DNA
attgcccaaacaacgacgatcg

SEQ ID NO: 8862 - DNA, 22 bp, synthetic construct
  misc_feature 1..22: note = Synthetic construct
  source 1..22: mol_type = other DNA
ttgcccaaacaacgacgatcgg

SEQ ID NO: 8863 - DNA, 22 bp, synthetic construct
  misc_feature 1..22: note = Synthetic construct
  source 1..22: mol_type = other DNA
tgcccaaacaacgacgatcggt

SEQ ID NO: 8864 - DNA, 22 bp, synthetic construct
  misc_feature 1..22: note = Synthetic construct
  source 1..22: mol_type = other DNA
gcccaaacaacgacgatcggta

SEQ ID NO: 8865 - DNA, 22 bp, synthetic construct
  misc_feature 1..22: note = Synthetic construct
  source 1..22: mol_type = other DNA
cccaaacaacgacgatcggtag

SEQ ID NO: 8866 - DNA, 22 bp, synthetic construct
  misc_feature 1..22: note = Synthetic construct
  source 1..22: mol_type = other DNA
ccaaacaacgacgatcggtagc

SEQ ID NO: 8867 - DNA, 22 bp, synthetic construct
  misc_feature 1..22: note = Synthetic construct
  source 1..22: mol_type = other DNA
caaacaacgacgatcggtagcc

SEQ ID NO: 8868 - DNA, 22 bp, synthetic construct
  misc_feature 1..22: note = Synthetic construct
  source 1..22: mol_type = other DNA
aaacaacgacgatcggtagcca

SEQ ID NO: 8869 - DNA, 22 bp, synthetic construct
  misc_feature 1..22: note = Synthetic construct
  source 1..22: mol_type = other DNA
aacaacgacgatcggtagccag

SEQ ID NO: 8870 - DNA, 22 bp, synthetic construct
  misc_feature 1..22: note = Synthetic construct
  source 1..22: mol_type = other DNA
acaacgacgatcggtagccaga

SEQ ID NO: 8871 - DNA, 22 bp, synthetic construct
  misc_feature 1..22: note = Synthetic construct
  source 1..22: mol_type = other DNA
caacgacgatcggtagccagag

SEQ ID NO: 8872 - DNA, 22 bp, synthetic construct
  misc_feature 1..22: note = Synthetic construct
  source 1..22: mol_type = other DNA
aacgacgatcggtagccagaga

SEQ ID NO: 8873 - DNA, 22 bp, synthetic construct
  misc_feature 1..22: note = Synthetic construct
  source 1..22: mol_type = other DNA
acgacgatcggtagccagagag

SEQ ID NO: 8874 - DNA, 22 bp, synthetic construct
  misc_feature 1..22: note = Synthetic construct
  source 1..22: mol_type = other DNA
cgacgatcggtagccagagagg

SEQ ID NO: 8875 - DNA, 22 bp, synthetic construct
  misc_feature 1..22: note = Synthetic construct
  source 1..22: mol_type = other DNA
gacgatcggtagccagagagga

SEQ ID NO: 8876 - DNA, 22 bp, synthetic construct
  misc_feature 1..22: note = Synthetic construct
  source 1..22: mol_type = other DNA
acgatcggtagccagagaggag

SEQ ID NO: 8877 - DNA, 22 bp, synthetic construct
  misc_feature 1..22: note = Synthetic construct
  source 1..22: mol_type = other DNA
cgatcggtagccagagaggagg

SEQ ID NO: 8878 - DNA, 22 bp, synthetic construct
  misc_feature 1..22: note = Synthetic construct
  source 1..22: mol_type = other DNA
gatcggtagccagagaggaggt

SEQ ID NO: 8879 - DNA, 22 bp, synthetic construct
  misc_feature 1..22: note = Synthetic construct
  source 1..22: mol_type = other DNA
atcggtagccagagaggaggtt

SEQ ID NO: 8880 - DNA, 22 bp, synthetic construct
  misc_feature 1..22: note = Synthetic construct
  source 1..22: mol_type = other DNA
tcggtagccagagaggaggttg

SEQ ID NO: 8881 - DNA, 22 bp, synthetic construct
  misc_feature 1..22: note = Synthetic construct
  source 1..22: mol_type = other DNA
cggtagccagagaggaggttgc

SEQ ID NO: 8882 - DNA, 22 bp, synthetic construct
  misc_feature 1..22: note = Synthetic construct
  source 1..22: mol_type = other DNA
ggtagccagagaggaggttgcc

SEQ ID NO: 8883 - DNA, 22 bp, synthetic construct
  misc_feature 1..22: note = Synthetic construct
  source 1..22: mol_type = other DNA
gtagccagagaggaggttgcca

SEQ ID NO: 8884 - DNA, 22 bp, synthetic construct
  misc_feature 1..22: note = Synthetic construct
  source 1..22: mol_type = other DNA
tagccagagaggaggttgccaa

SEQ ID NO: 8885 - DNA, 22 bp, synthetic construct
  misc_feature 1..22: note = Synthetic construct
  source 1..22: mol_type = other DNA
agccagagaggaggttgccaat

SEQ ID NO: 8886 - DNA, 22 bp, synthetic construct
  misc_feature 1..22: note = Synthetic construct
  source 1..22: mol_type = other DNA
gccagagaggaggttgccaata

SEQ ID NO: 8887 - DNA, 22 bp, synthetic construct
  misc_feature 1..22: note = Synthetic construct
  source 1..22: mol_type = other DNA
ccagagaggaggttgccaataa

SEQ ID NO: 8888 - DNA, 22 bp, synthetic construct
  misc_feature 1..22: note = Synthetic construct
  source 1..22: mol_type = other DNA
cagagaggaggttgccaataag

SEQ ID NO: 8889 - DNA, 22 bp, synthetic construct
  misc_feature 1..22: note = Synthetic construct
  source 1..22: mol_type = other DNA
agagaggaggttgccaataagg

SEQ ID NO: 8890 - DNA, 22 bp, synthetic construct
  misc_feature 1..22: note = Synthetic construct
  source 1..22: mol_type = other DNA
gagaggaggttgccaataaggc

SEQ ID NO: 8891 - DNA, 22 bp, synthetic construct
  misc_feature 1..22: note = Synthetic construct
  source 1..22: mol_type = other DNA
agaggaggttgccaataaggct

SEQ ID NO: 8892 - DNA, 22 bp, synthetic construct
  misc_feature 1..22: note = Synthetic construct
  source 1..22: mol_type = other DNA
gaggaggttgccaataaggcta

SEQ ID NO: 8893 - DNA, 22 bp, synthetic construct
  misc_feature 1..22: note = Synthetic construct
  source 1..22: mol_type = other DNA
aggaggttgccaataaggctac

SEQ ID NO: 8894 - DNA, 22 bp, synthetic construct
  misc_feature 1..22: note = Synthetic construct
  source 1..22: mol_type = other DNA
ggaggttgccaataaggctacg

SEQ ID NO: 8895 - DNA, 22 bp, synthetic construct
  misc_feature 1..22: note = Synthetic construct
  source 1..22: mol_type = other DNA
gaggttgccaataaggctacgg

SEQ ID NO: 8896 - DNA, 22 bp, synthetic construct
  misc_feature 1..22: note = Synthetic construct
  source 1..22: mol_type = other DNA
aggttgccaataaggctacgga

SEQ ID NO: 8897 - DNA, 22 bp, synthetic construct
  misc_feature 1..22: note = Synthetic construct
  source 1..22: mol_type = other DNA
ggttgccaataaggctacggat

SEQ ID NO: 8898 - DNA, 22 bp, synthetic construct
  misc_feature 1..22: note = Synthetic construct
  source 1..22: mol_type = other DNA
gttgccaataaggctacggatg

SEQ ID NO: 8899 - DNA, 22 bp, synthetic construct
  misc_feature 1..22: note = Synthetic construct
  source 1..22: mol_type = other DNA
ttgccaataaggctacggatgc

SEQ ID NO: 8900 - DNA, 22 bp, synthetic construct
  misc_feature 1..22: note = Synthetic construct
  source 1..22: mol_type = other DNA
tgccaataaggctacggatgct

SEQ ID NO: 8901 - DNA, 22 bp, synthetic construct
  misc_feature 1..22: note = Synthetic construct
  source 1..22: mol_type = other DNA
gccaataaggctacggatgctg

SEQ ID NO: 8902 - DNA, 22 bp, synthetic construct
  misc_feature 1..22: note = Synthetic construct
  source 1..22: mol_type = other DNA
ccaataaggctacggatgctgg

SEQ ID NO: 8903 - DNA, 22 bp, synthetic construct
  misc_feature 1..22: note = Synthetic construct
  source 1..22: mol_type = other DNA
caataaggctacggatgctggt

SEQ ID NO: 8904 - DNA, 22 bp, synthetic construct
  misc_feature 1..22: note = Synthetic construct
  source 1..22: mol_type = other DNA
aataaggctacggatgctggtt

SEQ ID NO: 8905 - DNA, 22 bp, synthetic construct
  misc_feature 1..22: note = Synthetic construct
  source 1..22: mol_type = other DNA
ataaggctacggatgctggttt

SEQ ID NO: 8906 - DNA, 22 bp, synthetic construct
  misc_feature 1..22: note = Synthetic construct
  source 1..22: mol_type = other DNA
taaggctacggatgctggtttg

SEQ ID NO: 8907 - DNA, 22 bp, synthetic construct
  misc_feature 1..22: note = Synthetic construct
  source 1..22: mol_type = other DNA
aaggctacggatgctggtttgt

SEQ ID NO: 8908 - DNA, 22 bp, synthetic construct
  misc_feature 1..22: note = Synthetic construct
  source 1..22: mol_type = other DNA
aggctacggatgctggtttgta

SEQ ID NO: 8909 - DNA, 22 bp, synthetic construct
  misc_feature 1..22: note = Synthetic construct
  source 1..22: mol_type = other DNA
ggctacggatgctggtttgtaa

SEQ ID NO: 8910 - DNA, 22 bp, synthetic construct
  misc_feature 1..22: note = Synthetic construct
  source 1..22: mol_type = other DNA
gctacggatgctggtttgtaaa

SEQ ID NO: 8911 - DNA, 22 bp, synthetic construct
  misc_feature 1..22: note = Synthetic construct
  source 1..22: mol_type = other DNA
ctacggatgctggtttgtaaaa

SEQ ID NO: 8912 - DNA, 22 bp, synthetic construct
  misc_feature 1..22: note = Synthetic construct
  source 1..22: mol_type = other DNA
tacggatgctggtttgtaaaac

SEQ ID NO: 8913 - DNA, 22 bp, synthetic construct
  misc_feature 1..22: note = Synthetic construct
  source 1..22: mol_type = other DNA
acggatgctggtttgtaaaaca

SEQ ID NO: 8914 - DNA, 22 bp, synthetic construct
  misc_feature 1..22: note = Synthetic construct
  source 1..22: mol_type = other DNA
cggatgctggtttgtaaaacat

SEQ ID NO: 8915 - DNA, 22 bp, synthetic construct
  misc_feature 1..22: note = Synthetic construct
  source 1..22: mol_type = other DNA
ggatgctggtttgtaaaacatc

SEQ ID NO: 8916 - DNA, 22 bp, synthetic construct
  misc_feature 1..22: note = Synthetic construct
  source 1..22: mol_type = other DNA
gatgctggtttgtaaaacatcc

SEQ ID NO: 8917 - DNA, 22 bp, synthetic construct
  misc_feature 1..22: note = Synthetic construct
  source 1..22: mol_type = other DNA
atgctggtttgtaaaacatccg

SEQ ID NO: 8918 - DNA, 22 bp, synthetic construct
  misc_feature 1..22: note = Synthetic construct
  source 1..22: mol_type = other DNA
tgctggtttgtaaaacatccgg

SEQ ID NO: 8919 - DNA, 22 bp, synthetic construct
  misc_feature 1..22: note = Synthetic construct
  source 1..22: mol_type = other DNA
gctggtttgtaaaacatccgga

SEQ ID NO: 8920 - DNA, 22 bp, synthetic construct
  misc_feature 1..22: note = Synthetic construct
  source 1..22: mol_type = other DNA
ctggtttgtaaaacatccggat

SEQ ID NO: 8921 - DNA, 22 bp, synthetic construct
  misc_feature 1..22: note = Synthetic construct
  source 1..22: mol_type = other DNA
tggtttgtaaaacatccggatc

SEQ ID NO: 8922 - DNA, 22 bp, synthetic construct
  misc_feature 1..22: note = Synthetic construct
  source 1..22: mol_type = other DNA
ggtttgtaaaacatccggatcc

SEQ ID NO: 8923 - DNA, 22 bp, synthetic construct
  misc_feature 1..22: note = Synthetic construct
  source 1..22: mol_type = other DNA
gtttgtaaaacatccggatccc

SEQ ID NO: 8924 - DNA, 22 bp, synthetic construct
  misc_feature 1..22: note = Synthetic construct
  source 1..22: mol_type = other DNA
tttgtaaaacatccggatccca

SEQ ID NO: 8925 - DNA, 22 bp, synthetic construct
  misc_feature 1..22: note = Synthetic construct
  source 1..22: mol_type = other DNA
ttgtaaaacatccggatcccat

SEQ ID NO: 8926 - DNA, 22 bp, synthetic construct
  misc_feature 1..22: note = Synthetic construct
  source 1..22: mol_type = other DNA
tgtaaaacatccggatcccatg

SEQ ID NO: 8927 - DNA, 22 bp, synthetic construct
  misc_feature 1..22: note = Synthetic construct
  source 1..22: mol_type = other DNA
gtaaaacatccggatcccatga

SEQ ID NO: 8928 - DNA, 22 bp, synthetic construct
  misc_feature 1..22: note = Synthetic construct
  source 1..22: mol_type = other DNA
taaaacatccggatcccatgac

SEQ ID NO: 8929 - DNA, 22 bp, synthetic construct
  misc_feature 1..22: note = Synthetic construct
  source 1..22: mol_type = other DNA
aaaacatccggatcccatgaca

SEQ ID NO: 8930 - DNA, 22 bp, synthetic construct
  misc_feature 1..22: note = Synthetic construct
  source 1..22: mol_type = other DNA
aaacatccggatcccatgacaa

SEQ ID NO: 8931 - DNA, 22 bp, synthetic construct
  misc_feature 1..22: note = Synthetic construct
  source 1..22: mol_type = other DNA
aacatccggatcccatgacaag

SEQ ID NO: 8932 - DNA, 22 bp, synthetic construct
  misc_feature 1..22: note = Synthetic construct
  source 1..22: mol_type = other DNA
acatccggatcccatgacaagg

SEQ ID NO: 8933 - DNA, 22 bp, synthetic construct
  misc_feature 1..22: note = Synthetic construct
  source 1..22: mol_type = other DNA
catccggatcccatgacaagga

SEQ ID NO: 8934 - DNA, 22 bp, synthetic construct
  misc_feature 1..22: note = Synthetic construct
  source 1..22: mol_type = other DNA
atccggatcccatgacaaggat

SEQ ID NO: 8935 - DNA, 22 bp, synthetic construct
  misc_feature 1..22: note = Synthetic construct
  source 1..22: mol_type = other DNA
tccggatcccatgacaaggatt

SEQ ID NO: 8936 - DNA, 22 bp, synthetic construct
  misc_feature 1..22: note = Synthetic construct
  source 1..22: mol_type = other DNA
ccggatcccatgacaaggattt

SEQ ID NO: 8937 - DNA, 22 bp, synthetic construct
  misc_feature 1..22: note = Synthetic construct
  source 1..22: mol_type = other DNA
cggatcccatgacaaggatttg

SEQ ID NO: 8938 - DNA, 22 bp, synthetic construct
  misc_feature 1..22: note = Synthetic construct
  source 1..22: mol_type = other DNA
ggatcccatgacaaggatttgt

SEQ ID NO: 8939 - DNA, 22 bp, synthetic construct
  misc_feature 1..22: note = Synthetic construct
  source 1..22: mol_type = other DNA
gatcccatgacaaggatttgtc

SEQ ID NO: 8940 - DNA, 22 bp, synthetic construct
  misc_feature 1..22: note = Synthetic construct
  source 1..22: mol_type = other DNA
atcccatgacaaggatttgtca

SEQ ID NO: 8941 - DNA, 22 bp, synthetic construct
  misc_feature 1..22: note = Synthetic construct
  source 1..22: mol_type = other DNA
tcccatgacaaggatttgtcat

SEQ ID NO: 8942 - DNA, 22 bp, synthetic construct
  misc_feature 1..22: note = Synthetic construct
  source 1..22: mol_type = other DNA
cccatgacaaggatttgtcatg

SEQ ID NO: 8943 - DNA, 22 bp, synthetic construct
  misc_feature 1..22: note = Synthetic construct
  source 1..22: mol_type = other DNA
ccatgacaaggatttgtcatgt

SEQ ID NO: 8944 - DNA, 22 bp, synthetic construct
  misc_feature 1..22: note = Synthetic construct
  source 1..22: mol_type = other DNA
catgacaaggatttgtcatgta

SEQ ID NO: 8945 - DNA, 22 bp, synthetic construct
  misc_feature 1..22: note = Synthetic construct
  source 1..22: mol_type = other DNA
atgacaaggatttgtcatgtaa

SEQ ID NO: 8946 - DNA, 22 bp, synthetic construct
  misc_feature 1..22: note = Synthetic construct
  source 1..22: mol_type = other DNA
tgacaaggatttgtcatgtaag

SEQ ID NO: 8947 - DNA, 22 bp, synthetic construct
  misc_feature 1..22: note = Synthetic construct
  source 1..22: mol_type = other DNA
gacaaggatttgtcatgtaaga

SEQ ID NO: 8948 - DNA, 22 bp, synthetic construct
  misc_feature 1..22: note = Synthetic construct
  source 1..22: mol_type = other DNA
acaaggatttgtcatgtaagaa

SEQ ID NO: 8949 - DNA, 22 bp, synthetic construct
  misc_feature 1..22: note = Synthetic construct
  source 1..22: mol_type = other DNA
caaggatttgtcatgtaagaaa

SEQ ID NO: 8950 - DNA, 22 bp, synthetic construct
  misc_feature 1..22: note = Synthetic construct
  source 1..22: mol_type = other DNA
aaggatttgtcatgtaagaaac

SEQ ID NO: 8951 - DNA, 22 bp, synthetic construct
  misc_feature 1..22: note = Synthetic construct
  source 1..22: mol_type = other DNA
aggatttgtcatgtaagaaacc

SEQ ID NO: 8952 - DNA, 22 bp, synthetic construct
  misc_feature 1..22: note = Synthetic construct
  source 1..22: mol_type = other DNA
ggatttgtcatgtaagaaacct

SEQ ID NO: 8953 - DNA, 22 bp, synthetic construct
  misc_feature 1..22: note = Synthetic construct
  source 1..22: mol_type = other DNA
gatttgtcatgtaagaaacctt

SEQ ID NO: 8954 - DNA, 22 bp, synthetic construct
  misc_feature 1..22: note = Synthetic construct
  source 1..22: mol_type = other DNA
atttgtcatgtaagaaaccttc

SEQ ID NO: 8955 - DNA, 22 bp, synthetic construct
  misc_feature 1..22: note = Synthetic construct
  source 1..22: mol_type = other DNA
tttgtcatgtaagaaaccttct

SEQ ID NO: 8956 - DNA, 22 bp, synthetic construct
  misc_feature 1..22: note = Synthetic construct
  source 1..22: mol_type = other DNA
ttgtcatgtaagaaaccttctc

SEQ ID NO: 8957 - DNA, 22 bp, synthetic construct
  misc_feature 1..22: note = Synthetic construct
  source 1..22: mol_type = other DNA
tgtcatgtaagaaaccttctct

SEQ ID NO: 8958 - DNA, 22 bp, synthetic construct
  misc_feature 1..22: note = Synthetic construct
  source 1..22: mol_type = other DNA
gtcatgtaagaaaccttctcta

SEQ ID NO: 8959 - DNA, 22 bp, synthetic construct
  misc_feature 1..22: note = Synthetic construct
  source 1..22: mol_type = other DNA
tcatgtaagaaaccttctctat

SEQ ID NO: 8960 - DNA, 22 bp, synthetic construct
  misc_feature 1..22: note = Synthetic construct
  source 1..22: mol_type = other DNA
catgtaagaaaccttctctatt

SEQ ID NO: 8961 - DNA, 22 bp, synthetic construct
  misc_feature 1..22: note = Synthetic construct
  source 1..22: mol_type = other DNA
atgtaagaaaccttctctattt

SEQ ID NO: 8962 - DNA, 22 bp, synthetic construct
  misc_feature 1..22: note = Synthetic construct
  source 1..22: mol_type = other DNA
tgtaagaaaccttctctattta

SEQ ID NO: 8963 - DNA, 22 bp, synthetic construct
  misc_feature 1..22: note = Synthetic construct
  source 1..22: mol_type = other DNA
gtaagaaaccttctctatttat

SEQ ID NO: 8964 - DNA, 22 bp, synthetic construct
  misc_feature 1..22: note = Synthetic construct
  source 1..22: mol_type = other DNA
taagaaaccttctctatttatc

SEQ ID NO: 8965 - DNA, 22 bp, synthetic construct
  misc_feature 1..22: note = Synthetic construct
  source 1..22: mol_type = other DNA
aagaaaccttctctatttatct

SEQ ID NO: 8966 - DNA, 22 bp, synthetic construct
  misc_feature 1..22: note = Synthetic construct
  source 1..22: mol_type = other DNA
agaaaccttctctatttatctg

SEQ ID NO: 8967 - DNA, 22 bp, synthetic construct
  misc_feature 1..22: note = Synthetic construct
  source 1..22: mol_type = other DNA
gaaaccttctctatttatctga

SEQ ID NO: 8968 - DNA, 22 bp, synthetic construct
  misc_feature 1..22: note = Synthetic construct
  source 1..22: mol_type = other DNA
aaaccttctctatttatctgac

SEQ ID NO: 8969 - DNA, 22 bp, synthetic construct
  misc_feature 1..22: note = Synthetic construct
  source 1..22: mol_type = other DNA
aaccttctctatttatctgacc

SEQ ID NO: 8970 - DNA, 22 bp, synthetic construct
  misc_feature 1..22: note = Synthetic construct
  source 1..22: mol_type = other DNA
accttctctatttatctgaccg

SEQ ID NO: 8971 - DNA, 22 bp, synthetic construct
  misc_feature 1..22: note = Synthetic construct
  source 1..22: mol_type = other DNA
ccttctctatttatctgaccgc

SEQ ID NO: 8972 - DNA, 22 bp, synthetic construct
  misc_feature 1..22: note = Synthetic construct
  source 1..22: mol_type = other DNA
cttctctatttatctgaccgcg

SEQ ID NO: 8973 - DNA, 22 bp, synthetic construct
  misc_feature 1..22: note = Synthetic construct
  source 1..22: mol_type = other DNA
ttctctatttatctgaccgcga

SEQ ID NO: 8974 - DNA, 22 bp, synthetic construct
  misc_feature 1..22: note = Synthetic construct
  source 1..22: mol_type = other DNA
tctctatttatctgaccgcgat

SEQ ID NO: 8975 - DNA, 22 bp, synthetic construct
  misc_feature 1..22: note = Synthetic construct
  source 1..22: mol_type = other DNA
ctctatttatctgaccgcgatc

SEQ ID NO: 8976 - DNA, 22 bp, synthetic construct
  misc_feature 1..22: note = Synthetic construct
  source 1..22: mol_type = other DNA
tctatttatctgaccgcgatca

SEQ ID NO: 8977 - DNA, 22 bp, synthetic construct
  misc_feature 1..22: note = Synthetic construct
  source 1..22: mol_type = other DNA
ctatttatctgaccgcgatcac

SEQ ID NO: 8978 - DNA, 22 bp, synthetic construct
  misc_feature 1..22: note = Synthetic construct
  source 1..22: mol_type = other DNA
tatttatctgaccgcgatcacc

SEQ ID NO: 8979 - DNA, 22 bp, synthetic construct
  misc_feature 1..22: note = Synthetic construct
  source 1..22: mol_type = other DNA
atttatctgaccgcgatcacca

SEQ ID NO: 8980 - DNA, 22 bp, synthetic construct
  misc_feature 1..22: note = Synthetic construct
  source 1..22: mol_type = other DNA
tttatctgaccgcgatcaccat

SEQ ID NO: 8981 - DNA, 22 bp, synthetic construct
  misc_feature 1..22: note = Synthetic construct
  source 1..22: mol_type = other DNA
ttatctgaccgcgatcaccatt

SEQ ID NO: 8982 - DNA, 22 bp, synthetic construct
  misc_feature 1..22: note = Synthetic construct
  source 1..22: mol_type = other DNA
tatctgaccgcgatcaccattc

SEQ ID NO: 8983 - DNA, 22 bp, synthetic construct
  misc_feature 1..22: note = Synthetic construct
  source 1..22: mol_type = other DNA
atctgaccgcgatcaccattcg

SEQ ID NO: 8984 - DNA, 22 bp, synthetic construct
  misc_feature 1..22: note = Synthetic construct
  source 1..22: mol_type = other DNA
tctgaccgcgatcaccattcgc

SEQ ID NO: 8985 - DNA, 22 bp, synthetic construct
  misc_feature 1..22: note = Synthetic construct
  source 1..22: mol_type = other DNA
ctgaccgcgatcaccattcgcc

SEQ ID NO: 8986 - DNA, 22 bp, synthetic construct
  misc_feature 1..22: note = Synthetic construct
  source 1..22: mol_type = other DNA
tgaccgcgatcaccattcgcct

SEQ ID NO: 8987 - DNA, 22 bp, synthetic construct
  misc_feature 1..22: note = Synthetic construct
  source 1..22: mol_type = other DNA
gaccgcgatcaccattcgcctc

SEQ ID NO: 8988 - DNA, 22 bp, synthetic construct
  misc_feature 1..22: note = Synthetic construct
  source 1..22: mol_type = other DNA
accgcgatcaccattcgcctcc

SEQ ID NO: 8989 - DNA, 22 bp, synthetic construct
  misc_feature 1..22: note = Synthetic construct
  source 1..22: mol_type = other DNA
ccgcgatcaccattcgcctccc

SEQ ID NO: 8990 - DNA, 22 bp, synthetic construct
  misc_feature 1..22: note = Synthetic construct
  source 1..22: mol_type = other DNA
cgcgatcaccattcgcctcccg

SEQ ID NO: 8991 - DNA, 22 bp, synthetic construct
  misc_feature 1..22: note = Synthetic construct
  source 1..22: mol_type = other DNA
gcgatcaccattcgcctcccgt

SEQ ID NO: 8992 - DNA, 22 bp, synthetic construct
  misc_feature 1..22: note = Synthetic construct
  source 1..22: mol_type = other DNA
cgatcaccattcgcctcccgta

SEQ ID NO: 8993 - DNA, 22 bp, synthetic construct
  misc_feature 1..22: note = Synthetic construct
  source 1..22: mol_type = other DNA
gatcaccattcgcctcccgtag

SEQ ID NO: 8994 - DNA, 22 bp, synthetic construct
  misc_feature 1..22: note = Synthetic construct
  source 1..22: mol_type = other DNA
atcaccattcgcctcccgtagc

SEQ ID NO: 8995 - DNA, 22 bp, synthetic construct
  misc_feature 1..22: note = Synthetic construct
  source 1..22: mol_type = other DNA
tcaccattcgcctcccgtagct

SEQ ID NO: 8996 - DNA, 22 bp, synthetic construct
  misc_feature 1..22: note = Synthetic construct
  source 1..22: mol_type = other DNA
caccattcgcctcccgtagctt

SEQ ID NO: 8997 - DNA, 22 bp, synthetic construct
  misc_feature 1..22: note = Synthetic construct
  source 1..22: mol_type = other DNA
accattcgcctcccgtagctta

SEQ ID NO: 8998 - DNA, 22 bp, synthetic construct
  misc_feature 1..22: note = Synthetic construct
  source 1..22: mol_type = other DNA
ccattcgcctcccgtagcttag

SEQ ID NO: 8999 - DNA, 22 bp, synthetic construct
  misc_feature 1..22: note = Synthetic construct
  source 1..22: mol_type = other DNA
cattcgcctcccgtagcttagc

SEQ ID NO: 9000 - DNA, 22 bp, synthetic construct
  misc_feature 1..22: note = Synthetic construct
  source 1..22: mol_type = other DNA
attcgcctcccgtagcttagcg

SEQ ID NO: 9001 - DNA, 22 bp, synthetic construct
  misc_feature 1..22: note = Synthetic construct
  source 1..22: mol_type = other DNA
ttcgcctcccgtagcttagcga

SEQ ID NO: 9002 - DNA, 22 bp, synthetic construct
  misc_feature 1..22: note = Synthetic construct
  source 1..22: mol_type = other DNA
tcgcctcccgtagcttagcgat

SEQ ID NO: 9003 - DNA, 22 bp, synthetic construct
  misc_feature 1..22: note = Synthetic construct
  source 1..22: mol_type = other DNA
cgcctcccgtagcttagcgata

SEQ ID NO: 9004 - DNA, 22 bp, synthetic construct
  misc_feature 1..22: note = Synthetic construct
  source 1..22: mol_type = other DNA
gcctcccgtagcttagcgatag

SEQ ID NO: 9005 - DNA, 22 bp, synthetic construct
  misc_feature 1..22: note = Synthetic construct
  source 1..22: mol_type = other DNA
cctcccgtagcttagcgatagc

SEQ ID NO: 9006 - DNA, 22 bp, synthetic construct
  misc_feature 1..22: note = Synthetic construct
  source 1..22: mol_type = other DNA
ctcccgtagcttagcgatagct

SEQ ID NO: 9007 - DNA, 22 bp, synthetic construct
  misc_feature 1..22: note = Synthetic construct
  source 1..22: mol_type = other DNA
tcccgtagcttagcgatagcta

SEQ ID NO: 9008 - DNA, 22 bp, synthetic construct
  misc_feature 1..22: note = Synthetic construct
  source 1..22: mol_type = other DNA
cccgtagcttagcgatagctaa

SEQ ID NO: 9009 - DNA, 22 bp, synthetic construct
  misc_feature 1..22: note = Synthetic construct
  source 1..22: mol_type = other DNA
ccgtagcttagcgatagctaag

SEQ ID NO: 9010 - DNA, 22 bp, synthetic construct
  misc_feature 1..22: note = Synthetic construct
  source 1..22: mol_type = other DNA
cgtagcttagcgatagctaagg

SEQ ID NO: 9011 - DNA, 22 bp, synthetic construct
  misc_feature 1..22: note = Synthetic construct
  source 1..22: mol_type = other DNA
gtagcttagcgatagctaaggt

SEQ ID NO: 9012 - DNA, 22 bp, synthetic construct
  misc_feature 1..22: note = Synthetic construct
  source 1..22: mol_type = other DNA
tagcttagcgatagctaaggta

SEQ ID NO: 9013 - DNA, 22 bp, synthetic construct
  misc_feature 1..22: note = Synthetic construct
  source 1..22: mol_type = other DNA
agcttagcgatagctaaggtac

SEQ ID NO: 9014 - DNA, 22 bp, synthetic construct
  misc_feature 1..22: note = Synthetic construct
  source 1..22: mol_type = other DNA
gcttagcgatagctaaggtacg

SEQ ID NO: 9015 - DNA, 22 bp, synthetic construct
  misc_feature 1..22: note = Synthetic construct
  source 1..22: mol_type = other DNA
cttagcgatagctaaggtacga

SEQ ID NO: 9016 - DNA, 22 bp, synthetic construct
  misc_feature 1..22: note = Synthetic construct
  source 1..22: mol_type = other DNA
ttagcgatagctaaggtacgac

SEQ ID NO: 9017 - DNA, 22 bp, synthetic construct
  misc_feature 1..22: note = Synthetic construct
  source 1..22: mol_type = other DNA
tagcgatagctaaggtacgacg

SEQ ID NO: 9018 - DNA, 22 bp, synthetic construct
  misc_feature 1..22: note = Synthetic construct
  source 1..22: mol_type = other DNA
agcgatagctaaggtacgacgg

SEQ ID NO: 9019 - DNA, 22 bp, synthetic construct
  misc_feature 1..22: note = Synthetic construct
  source 1..22: mol_type = other DNA
gcgatagctaaggtacgacggg

SEQ ID NO: 9020 - DNA, 22 bp, synthetic construct
  misc_feature 1..22: note = Synthetic construct
  source 1..22: mol_type = other DNA
cgatagctaaggtacgacgggt

SEQ ID NO: 9021 - DNA, 22 bp, synthetic construct
  misc_feature 1..22: note = Synthetic construct
  source 1..22: mol_type = other DNA
gatagctaaggtacgacgggtc

SEQ ID NO: 9022 - DNA, 22 bp, synthetic construct
  misc_feature 1..22: note = Synthetic construct
  source 1..22: mol_type = other DNA
atagctaaggtacgacgggtcg

SEQ ID NO: 9023 - DNA, 22 bp, synthetic construct
  misc_feature 1..22: note = Synthetic construct
  source 1..22: mol_type = other DNA
tagctaaggtacgacgggtcgc

SEQ ID NO: 9024 - DNA, 22 bp, synthetic construct
  misc_feature 1..22: note = Synthetic construct
  source 1..22: mol_type = other DNA
agctaaggtacgacgggtcgcc

SEQ ID NO: 9025 - DNA, 22 bp, synthetic construct
  misc_feature 1..22: note = Synthetic construct
  source 1..22: mol_type = other DNA
gctaaggtacgacgggtcgcct

SEQ ID NO: 9026 - DNA, 22 bp, synthetic construct
  misc_feature 1..22: note = Synthetic construct
  source 1..22: mol_type = other DNA
ctaaggtacgacgggtcgcctc

SEQ ID NO: 9027 - DNA, 22 bp, synthetic construct
  misc_feature 1..22: note = Synthetic construct
  source 1..22: mol_type = other DNA
taaggtacgacgggtcgcctcg

SEQ ID NO: 9028 - DNA, 22 bp, synthetic construct
  misc_feature 1..22: note = Synthetic construct
  source 1..22: mol_type = other DNA
aaggtacgacgggtcgcctcgt

SEQ ID NO: 9029 - DNA, 22 bp, synthetic construct
  misc_feature 1..22: note = Synthetic construct
  source 1..22: mol_type = other DNA
aggtacgacgggtcgcctcgtc

SEQ ID NO: 9030 - DNA, 22 bp, synthetic construct
  misc_feature 1..22: note = Synthetic construct
  source 1..22: mol_type = other DNA
ggtacgacgggtcgcctcgtca

SEQ ID NO: 9031 - DNA, 22 bp, synthetic construct
  misc_feature 1..22: note = Synthetic construct
  source 1..22: mol_type = other DNA
gtacgacgggtcgcctcgtcat

SEQ ID NO: 9032 - DNA, 22 bp, synthetic construct
  misc_feature 1..22: note = Synthetic construct
  source 1..22: mol_type = other DNA
tacgacgggtcgcctcgtcatt

SEQ ID NO: 9033 - DNA, 22 bp, synthetic construct
  misc_feature 1..22: note = Synthetic construct
  source 1..22: mol_type = other DNA
acgacgggtcgcctcgtcatta

SEQ ID NO: 9034 - DNA, 22 bp, synthetic construct
  misc_feature 1..22: note = Synthetic construct
  source 1..22: mol_type = other DNA
cgacgggtcgcctcgtcattac

SEQ ID NO: 9035 - DNA, 22 bp, synthetic construct
  misc_feature 1..22: note = Synthetic construct
  source 1..22: mol_type = other DNA
gacgggtcgcctcgtcattacc

SEQ ID NO: 9036 - DNA, 22 bp, synthetic construct
  misc_feature 1..22: note = Synthetic construct
  source 1..22: mol_type = other DNA
acgggtcgcctcgtcattacca

SEQ ID NO: 9037 - DNA, 22 bp, synthetic construct
  misc_feature 1..22: note = Synthetic construct
  source 1..22: mol_type = other DNA
cgggtcgcctcgtcattaccag

SEQ ID NO: 9038 - DNA, 22 bp, synthetic construct
  misc_feature 1..22: note = Synthetic construct
  source 1..22: mol_type = other DNA
gggtcgcctcgtcattaccaga

SEQ ID NO: 9039 - DNA, 22 bp, synthetic construct
  misc_feature 1..22: note = Synthetic construct
  source 1..22: mol_type = other DNA
ggtcgcctcgtcattaccagaa

SEQ ID NO: 9040 - DNA, 22 bp, synthetic construct
  misc_feature 1..22: note = Synthetic construct
  source 1..22: mol_type = other DNA
gtcgcctcgtcattaccagaac

SEQ ID NO: 9041 - DNA, 22 bp, synthetic construct
  misc_feature 1..22: note = Synthetic construct
  source 1..22: mol_type = other DNA
tcgcctcgtcattaccagaacc

SEQ ID NO: 9042 - DNA, 22 bp, synthetic construct
  misc_feature 1..22: note = Synthetic construct
  source 1..22: mol_type = other DNA
cgcctcgtcattaccagaacct

SEQ ID NO: 9043 - DNA, 22 bp, synthetic construct
  misc_feature 1..22: note = Synthetic construct
  source 1..22: mol_type = other DNA
gcctcgtcattaccagaaccta

SEQ ID NO: 9044 - DNA, 22 bp, synthetic construct
  misc_feature 1..22: note = Synthetic construct
  source 1..22: mol_type = other DNA
cctcgtcattaccagaacctaa

SEQ ID NO: 9045 - DNA, 22 bp, synthetic construct
  misc_feature 1..22: note = Synthetic construct
  source 1..22: mol_type = other DNA
ctcgtcattaccagaacctaag

SEQ ID NO: 9046 - DNA, 22 bp, synthetic construct
  misc_feature 1..22: note = Synthetic construct
  source 1..22: mol_type = other DNA
tcgtcattaccagaacctaagg

SEQ ID NO: 9047 - DNA, 22 bp, synthetic construct
  misc_feature 1..22: note = Synthetic construct
  source 1..22: mol_type = other DNA
cgtcattaccagaacctaaggt

SEQ ID NO: 9048 - DNA, 22 bp, synthetic construct
  misc_feature 1..22: note = Synthetic construct
  source 1..22: mol_type = other DNA
gtcattaccagaacctaaggtc

SEQ ID NO: 9049 - DNA, 22 bp, synthetic construct
  misc_feature 1..22: note = Synthetic construct
  source 1..22: mol_type = other DNA
tcattaccagaacctaaggtcg

SEQ ID NO: 9050 - DNA, 22 bp, synthetic construct
  misc_feature 1..22: note = Synthetic construct
  source 1..22: mol_type = other DNA
cattaccagaacctaaggtcgg

SEQ ID NO: 9051 - DNA, 22 bp, synthetic construct
  misc_feature 1..22: note = Synthetic construct
  source 1..22: mol_type = other DNA
attaccagaacctaaggtcgga

SEQ ID NO: 9052 - DNA, 22 bp, synthetic construct
  misc_feature 1..22: note = Synthetic construct
  source 1..22: mol_type = other DNA
ttaccagaacctaaggtcggat

SEQ ID NO: 9053 - DNA, 22 bp, synthetic construct
  misc_feature 1..22: note = Synthetic construct
  source 1..22: mol_type = other DNA
taccagaacctaaggtcggatg

SEQ ID NO: 9054 - DNA, 22 bp, synthetic construct
  misc_feature 1..22: note = Synthetic construct
  source 1..22: mol_type = other DNA
accagaacctaaggtcggatgc

SEQ ID NO: 9055 - DNA, 22 bp, synthetic construct
  misc_feature 1..22: note = Synthetic construct
  source 1..22: mol_type = other DNA
ccagaacctaaggtcggatgct

SEQ ID NO: 9056 - DNA, 22 bp, synthetic construct
  misc_feature 1..22: note = Synthetic construct
  source 1..22: mol_type = other DNA
cagaacctaaggtcggatgctt

SEQ ID NO: 9057 - DNA, 22 bp, synthetic construct
  misc_feature 1..22: note = Synthetic construct
  source 1..22: mol_type = other DNA
agaacctaaggtcggatgcttt

SEQ ID NO: 9058 - DNA, 22 bp, synthetic construct
  misc_feature 1..22: note = Synthetic construct
  source 1..22: mol_type = other DNA
gaacctaaggtcggatgctttg

SEQ ID NO: 9059 - DNA, 22 bp, synthetic construct
  misc_feature 1..22: note = Synthetic construct
  source 1..22: mol_type = other DNA
aacctaaggtcggatgctttgt

SEQ ID NO: 9060 - DNA, 22 bp, synthetic construct
  misc_feature 1..22: note = Synthetic construct
  source 1..22: mol_type = other DNA
acctaaggtcggatgctttgtg

SEQ ID NO: 9061 - DNA, 22 bp, synthetic construct
  misc_feature 1..22: note = Synthetic construct
  source 1..22: mol_type = other DNA
cctaaggtcggatgctttgtga

SEQ ID NO: 9062 - DNA, 22 bp, synthetic construct
  misc_feature 1..22: note = Synthetic construct
  source 1..22: mol_type = other DNA
ctaaggtcggatgctttgtgag

SEQ ID NO: 9063 - DNA, 22 bp, synthetic construct
  misc_feature 1..22: note = Synthetic construct
  source 1..22: mol_type = other DNA
taaggtcggatgctttgtgagc

SEQ ID NO: 9064 - DNA, 22 bp, synthetic construct
  misc_feature 1..22: note = Synthetic construct
  source 1..22: mol_type = other DNA
aaggtcggatgctttgtgagca

SEQ ID NO: 9065 - DNA, 22 bp, synthetic construct
  misc_feature 1..22: note = Synthetic construct
  source 1..22: mol_type = other DNA
aggtcggatgctttgtgagcaa

SEQ ID NO: 9066 - DNA, 22 bp, synthetic construct
  misc_feature 1..22: note = Synthetic construct
  source 1..22: mol_type = other DNA
ggtcggatgctttgtgagcaat

SEQ ID NO: 9067 - DNA, 22 bp, synthetic construct
  misc_feature 1..22: note = Synthetic construct
  source 1..22: mol_type = other DNA
gtcggatgctttgtgagcaatt

SEQ ID NO: 9068 - DNA, 22 bp, synthetic construct
  misc_feature 1..22: note = Synthetic construct
  source 1..22: mol_type = other DNA
tcggatgctttgtgagcaattc

SEQ ID NO: 9069 - DNA, 22 bp, synthetic construct
  misc_feature 1..22: note = Synthetic construct
  source 1..22: mol_type = other DNA
cggatgctttgtgagcaattcg

SEQ ID NO: 9070 - DNA, 22 bp, synthetic construct
  misc_feature 1..22: note = Synthetic construct
  source 1..22: mol_type = other DNA
ggatgctttgtgagcaattcgt

SEQ ID NO: 9071 - DNA, 22 bp, synthetic construct
  misc_feature 1..22: note = Synthetic construct
  source 1..22: mol_type = other DNA
gatgctttgtgagcaattcgtc

SEQ ID NO: 9072 - DNA, 22 bp, synthetic construct
  misc_feature 1..22: note = Synthetic construct
  source 1..22: mol_type = other DNA
atgctttgtgagcaattcgtcc

SEQ ID NO: 9073 - DNA, 22 bp, synthetic construct
  misc_feature 1..22: note = Synthetic construct
  source 1..22: mol_type = other DNA
tgctttgtgagcaattcgtccc

SEQ ID NO: 9074 - DNA, 22 bp, synthetic construct
  misc_feature 1..22: note = Synthetic construct
  source 1..22: mol_type = other DNA
gctttgtgagcaattcgtccct

SEQ ID NO: 9075 - DNA, 22 bp, synthetic construct
  misc_feature 1..22: note = Synthetic construct
  source 1..22: mol_type = other DNA
ctttgtgagcaattcgtccctt

SEQ ID NO: 9076 - DNA, 22 bp, synthetic construct
  misc_feature 1..22: note = Synthetic construct
  source 1..22: mol_type = other DNA
tttgtgagcaattcgtccctta

SEQ ID NO: 9077 - DNA, 22 bp, synthetic construct
  misc_feature 1..22: note = Synthetic construct
  source 1..22: mol_type = other DNA
ttgtgagcaattcgtcccttaa

SEQ ID NO: 9078 - DNA, 22 bp, synthetic construct
  misc_feature 1..22: note = Synthetic construct
  source 1..22: mol_type = other DNA
tgtgagcaattcgtcccttaag

SEQ ID NO: 9079 - DNA, 22 bp, synthetic construct
  misc_feature 1..22: note = Synthetic construct
  source 1..22: mol_type = other DNA
gtgagcaattcgtcccttaagt

SEQ ID NO: 9080 - DNA, 22 bp, synthetic construct
  misc_feature 1..22: note = Synthetic construct
  source 1..22: mol_type = other DNA
tgagcaattcgtcccttaagta

SEQ ID NO: 9081 - DNA, 22 bp, synthetic construct
  misc_feature 1..22: note = Synthetic construct
  source 1..22: mol_type = other DNA
gagcaattcgtcccttaagtaa

SEQ ID NO: 9082 - DNA, 22 bp, synthetic construct
  misc_feature 1..22: note = Synthetic construct
  source 1..22: mol_type = other DNA
agcaattcgtcccttaagtaag

SEQ ID NO: 9083 - DNA, 22 bp, synthetic construct
  misc_feature 1..22: note = Synthetic construct
  source 1..22: mol_type = other DNA
gcaattcgtcccttaagtaagc

SEQ ID NO: 9084 - DNA, 22 bp, synthetic construct
  misc_feature 1..22: note = Synthetic construct
  source 1..22: mol_type = other DNA
caattcgtcccttaagtaagca

SEQ ID NO: 9085 - DNA, 22 bp, synthetic construct
  misc_feature 1..22: note = Synthetic construct
  source 1..22: mol_type = other DNA
aattcgtcccttaagtaagcaa

SEQ ID NO: 9086 - DNA, 22 bp, synthetic construct
  misc_feature 1..22: note = Synthetic construct
  source 1..22: mol_type = other DNA
attcgtcccttaagtaagcaat

SEQ ID NO: 9087 - DNA, 22 bp, synthetic construct
  misc_feature 1..22: note = Synthetic construct
  source 1..22: mol_type = other DNA
ttcgtcccttaagtaagcaatt

SEQ ID NO: 9088 - DNA, 22 bp, synthetic construct
  misc_feature 1..22: note = Synthetic construct
  source 1..22: mol_type = other DNA
tcgtcccttaagtaagcaattg

SEQ ID NO: 9089 - DNA, 22 bp, synthetic construct
  misc_feature 1..22: note = Synthetic construct
  source 1..22: mol_type = other DNA
cgtcccttaagtaagcaattgc

SEQ ID NO: 9090 - DNA, 22 bp, synthetic construct
  misc_feature 1..22: note = Synthetic construct
  source 1..22: mol_type = other DNA
gtcccttaagtaagcaattgct

SEQ ID NO: 9091 - DNA, 22 bp, synthetic construct
  misc_feature 1..22: note = Synthetic construct
  source 1..22: mol_type = other DNA
tcccttaagtaagcaattgctg

SEQ ID NO: 9092 - DNA, 22 bp, synthetic construct
  misc_feature 1..22: note = Synthetic construct
  source 1..22: mol_type = other DNA
cccttaagtaagcaattgctgt

SEQ ID NO: 9093 - DNA, 22 bp, synthetic construct
  misc_feature 1..22: note = Synthetic construct
  source 1..22: mol_type = other DNA
ccttaagtaagcaattgctgta

SEQ ID NO: 9094 - DNA, 22 bp, synthetic construct
  misc_feature 1..22: note = Synthetic construct
  source 1..22: mol_type = other DNA
cttaagtaagcaattgctgtaa

SEQ ID NO: 9095 - DNA, 22 bp, synthetic construct
  misc_feature 1..22: note = Synthetic construct
  source 1..22: mol_type = other DNA
ttaagtaagcaattgctgtaaa

SEQ ID NO: 9096 - DNA, 22 bp, synthetic construct
  misc_feature 1..22: note = Synthetic construct
  source 1..22: mol_type = other DNA
taagtaagcaattgctgtaaag

SEQ ID NO: 9097 - DNA, 22 bp, synthetic construct
  misc_feature 1..22: note = Synthetic construct
  source 1..22: mol_type = other DNA
aagtaagcaattgctgtaaagt

SEQ ID NO: 9098 - DNA, 22 bp, synthetic construct
  misc_feature 1..22: note = Synthetic construct
  source 1..22: mol_type = other DNA
agtaagcaattgctgtaaagtc

SEQ ID NO: 9099 - DNA, 22 bp, synthetic construct
  misc_feature 1..22: note = Synthetic construct
  source 1..22: mol_type = other DNA
gtaagcaattgctgtaaagtcg

SEQ ID NO: 9100 - DNA, 22 bp, synthetic construct
  misc_feature 1..22: note = Synthetic construct
  source 1..22: mol_type = other DNA
taagcaattgctgtaaagtcgt

SEQ ID NO: 9101 - DNA, 22 bp, synthetic construct
  misc_feature 1..22: note = Synthetic construct
  source 1..22: mol_type = other DNA
aagcaattgctgtaaagtcgtc

SEQ ID NO: 9102 - DNA, 22 bp, synthetic construct
  misc_feature 1..22: note = Synthetic construct
  source 1..22: mol_type = other DNA
agcaattgctgtaaagtcgtca

SEQ ID NO: 9103 - DNA, 22 bp, synthetic construct
  misc_feature 1..22: note = Synthetic construct
  source 1..22: mol_type = other DNA
gcaattgctgtaaagtcgtcac

SEQ ID NO: 9104 - DNA, 22 bp, synthetic construct
  misc_feature 1..22: note = Synthetic construct
  source 1..22: mol_type = other DNA
caattgctgtaaagtcgtcact

SEQ ID NO: 9105 - DNA, 22 bp, synthetic construct
  misc_feature 1..22: note = Synthetic construct
  source 1..22: mol_type = other DNA
aattgctgtaaagtcgtcactg

SEQ ID NO: 9106 - DNA, 22 bp, synthetic construct
  misc_feature 1..22: note = Synthetic construct
  source 1..22: mol_type = other DNA
attgctgtaaagtcgtcactgt

SEQ ID NO: 9107 - DNA, 22 bp, synthetic construct
  misc_feature 1..22: note = Synthetic construct
  source 1..22: mol_type = other DNA
ttgctgtaaagtcgtcactgtg

SEQ ID NO: 9108 - DNA, 22 bp, synthetic construct
  misc_feature 1..22: note = Synthetic construct
  source 1..22: mol_type = other DNA
tgctgtaaagtcgtcactgtgc

SEQ ID NO: 9109 - DNA, 22 bp, synthetic construct
  misc_feature 1..22: note = Synthetic construct
  source 1..22: mol_type = other DNA
gctgtaaagtcgtcactgtgcg

SEQ ID NO: 9110 - DNA, 22 bp, synthetic construct
  misc_feature 1..22: note = Synthetic construct
  source 1..22: mol_type = other DNA
ctgtaaagtcgtcactgtgcgg

SEQ ID NO: 9111 - DNA, 22 bp, synthetic construct
  misc_feature 1..22: note = Synthetic construct
  source 1..22: mol_type = other DNA
tgtaaagtcgtcactgtgcgga

SEQ ID NO: 9112 - DNA, 22 bp, synthetic construct
  misc_feature 1..22: note = Synthetic construct
  source 1..22: mol_type = other DNA
gtaaagtcgtcactgtgcggat

SEQ ID NO: 9113 - DNA, 22 bp, synthetic construct
  misc_feature 1..22: note = Synthetic construct
  source 1..22: mol_type = other DNA
taaagtcgtcactgtgcggatc

SEQ ID NO: 9114 - DNA, 22 bp, synthetic construct
  misc_feature 1..22: note = Synthetic construct
  source 1..22: mol_type = other DNA
aaagtcgtcactgtgcggatca

SEQ ID NO: 9115 - DNA, 22 bp, synthetic construct
  misc_feature 1..22: note = Synthetic construct
  source 1..22: mol_type = other DNA
aagtcgtcactgtgcggatcac

SEQ ID NO: 9116 - DNA, 22 bp, synthetic construct
  misc_feature 1..22: note = Synthetic construct
  source 1..22: mol_type = other DNA
agtcgtcactgtgcggatcacc

SEQ ID NO: 9117 - DNA, 22 bp, synthetic construct
  misc_feature 1..22: note = Synthetic construct
  source 1..22: mol_type = other DNA
gtcgtcactgtgcggatcaccg

SEQ ID NO: 9118 - DNA, 22 bp, synthetic construct
  misc_feature 1..22: note = Synthetic construct
  source 1..22: mol_type = other DNA
tcgtcactgtgcggatcaccgc

SEQ ID NO: 9119 - DNA, 22 bp, synthetic construct
  misc_feature 1..22: note = Synthetic construct
  source 1..22: mol_type = other DNA
cgtcactgtgcggatcaccgct

SEQ ID NO: 9120 - DNA, 22 bp, synthetic construct
  misc_feature 1..22: note = Synthetic construct
  source 1..22: mol_type = other DNA
gtcactgtgcggatcaccgctt

SEQ ID NO: 9121 - DNA, 22 bp, synthetic construct
  misc_feature 1..22: note = Synthetic construct
  source 1..22: mol_type = other DNA
tcactgtgcggatcaccgcttc

SEQ ID NO: 9122 - DNA, 22 bp, synthetic construct
  misc_feature 1..22: note = Synthetic construct
  source 1..22: mol_type = other DNA
cactgtgcggatcaccgcttcc

SEQ ID NO: 9123 - DNA, 22 bp, synthetic construct
  misc_feature 1..22: note = Synthetic construct
  source 1..22: mol_type = other DNA
actgtgcggatcaccgcttcca

SEQ ID NO: 9124 - DNA, 22 bp, synthetic construct
  misc_feature 1..22: note = Synthetic construct
  source 1..22: mol_type = other DNA
ctgtgcggatcaccgcttccag

SEQ ID NO: 9125 - DNA, 22 bp, synthetic construct
  misc_feature 1..22: note = Synthetic construct
  source 1..22: mol_type = other DNA
tgtgcggatcaccgcttccagt

SEQ ID NO: 9126 - DNA, 22 bp, synthetic construct
  misc_feature 1..22: note = Synthetic construct
  source 1..22: mol_type = other DNA
gtgcggatcaccgcttccagta

SEQ ID NO: 9127 - DNA, 22 bp, synthetic construct
  misc_feature 1..22: note = Synthetic construct
  source 1..22: mol_type = other DNA
tgcggatcaccgcttccagtag

SEQ ID NO: 9128 - DNA, 22 bp, synthetic construct
  misc_feature 1..22: note = Synthetic construct
  source 1..22: mol_type = other DNA
gcggatcaccgcttccagtagc

SEQ ID NO: 9129 - DNA, 22 bp, synthetic construct
  misc_feature 1..22: note = Synthetic construct
  source 1..22: mol_type = other DNA
cggatcaccgcttccagtagcg

SEQ ID NO: 9130 - DNA, 22 bp, synthetic construct
  misc_feature 1..22: note = Synthetic construct
  source 1..22: mol_type = other DNA
ggatcaccgcttccagtagcga

SEQ ID NO: 9131 - DNA, 22 bp, synthetic construct
  misc_feature 1..22: note = Synthetic construct
  source 1..22: mol_type = other DNA
gatcaccgcttccagtagcgac

SEQ ID NO: 9132 - DNA, 22 bp, synthetic construct
  misc_feature 1..22: note = Synthetic construct
  source 1..22: mol_type = other DNA
atcaccgcttccagtagcgaca

SEQ ID NO: 9133 - DNA, 22 bp, synthetic construct
  misc_feature 1..22: note = Synthetic construct
  source 1..22: mol_type = other DNA
tcaccgcttccagtagcgacag

SEQ ID NO: 9134 - DNA, 22 bp, synthetic construct
  misc_feature 1..22: note = Synthetic construct
  source 1..22: mol_type = other DNA
caccgcttccagtagcgacaga

SEQ ID NO: 9135 - DNA, 22 bp, synthetic construct
  misc_feature 1..22: note = Synthetic construct
  source 1..22: mol_type = other DNA
accgcttccagtagcgacagaa

SEQ ID NO: 9136 - DNA, 22 bp, synthetic construct
  misc_feature 1..22: note = Synthetic construct
  source 1..22: mol_type = other DNA
ccgcttccagtagcgacagaag

SEQ ID NO: 9137 - DNA, 22 bp, synthetic construct
  misc_feature 1..22: note = Synthetic construct
  source 1..22: mol_type = other DNA
cgcttccagtagcgacagaagc

SEQ ID NO: 9138 - DNA, 22 bp, synthetic construct
  misc_feature 1..22: note = Synthetic construct
  source 1..22: mol_type = other DNA
gcttccagtagcgacagaagca

SEQ ID NO: 9139 - DNA, 22 bp, synthetic construct
  misc_feature 1..22: note = Synthetic construct
  source 1..22: mol_type = other DNA
cttccagtagcgacagaagcaa

SEQ ID NO: 9140 - DNA, 22 bp, synthetic construct
  misc_feature 1..22: note = Synthetic construct
  source 1..22: mol_type = other DNA
ttccagtagcgacagaagcaat

SEQ ID NO: 9141 - DNA, 22 bp, synthetic construct
  misc_feature 1..22: note = Synthetic construct
  source 1..22: mol_type = other DNA
tccagtagcgacagaagcaatt

SEQ ID NO: 9142 - DNA, 22 bp, synthetic construct
  misc_feature 1..22: note = Synthetic construct
  source 1..22: mol_type = other DNA
ccagtagcgacagaagcaattg

SEQ ID NO: 9143 - DNA, 22 bp, synthetic construct
  misc_feature 1..22: note = Synthetic construct
  source 1..22: mol_type = other DNA
cagtagcgacagaagcaattga

SEQ ID NO: 9144 - DNA, 22 bp, synthetic construct
  misc_feature 1..22: note = Synthetic construct
  source 1..22: mol_type = other DNA
agtagcgacagaagcaattgat

SEQ ID NO: 9145 - DNA, 22 bp, synthetic construct
  misc_feature 1..22: note = Synthetic construct
  source 1..22: mol_type = other DNA
gtagcgacagaagcaattgatt

SEQ ID NO: 9146 - DNA, 22 bp, synthetic construct
  misc_feature 1..22: note = Synthetic construct
  source 1..22: mol_type = other DNA
tagcgacagaagcaattgattg

SEQ ID NO: 9147 - DNA, 22 bp, synthetic construct
  misc_feature 1..22: note = Synthetic construct
  source 1..22: mol_type = other DNA
agcgacagaagcaattgattgg

SEQ ID NO: 9148 - DNA, 22 bp, synthetic construct
  misc_feature 1..22: note = Synthetic construct
  source 1..22: mol_type = other DNA
gcgacagaagcaattgattggt

SEQ ID NO: 9149 - DNA, 22 bp, synthetic construct
  misc_feature 1..22: note = Synthetic construct
  source 1..22: mol_type = other DNA
cgacagaagcaattgattggta

SEQ ID NO: 9150 - DNA, 22 bp, synthetic construct
  misc_feature 1..22: note = Synthetic construct
  source 1..22: mol_type = other DNA
gacagaagcaattgattggtaa

SEQ ID NO: 9151 - DNA, 22 bp, synthetic construct
  misc_feature 1..22: note = Synthetic construct
  source 1..22: mol_type = other DNA
acagaagcaattgattggtaaa

SEQ ID NO: 9152 - DNA, 22 bp, synthetic construct
  misc_feature 1..22: note = Synthetic construct
  source 1..22: mol_type = other DNA
cagaagcaattgattggtaaat

SEQ ID NO: 9153 - DNA, 22 bp, synthetic construct
  misc_feature 1..22: note = Synthetic construct
  source 1..22: mol_type = other DNA
agaagcaattgattggtaaatt

SEQ ID NO: 9154 - DNA, 22 bp, synthetic construct
  misc_feature 1..22: note = Synthetic construct
  source 1..22: mol_type = other DNA
gaagcaattgattggtaaattt

SEQ ID NO: 9155 - DNA, 22 bp, synthetic construct
  misc_feature 1..22: note = Synthetic construct
  source 1..22: mol_type = other DNA
aagcaattgattggtaaatttc

SEQ ID NO: 9156 - DNA, 22 bp, synthetic construct
  misc_feature 1..22: note = Synthetic construct
  source 1..22: mol_type = other DNA
agcaattgattggtaaatttcg

SEQ ID NO: 9157 - DNA, 22 bp, synthetic construct
  misc_feature 1..22: note = Synthetic construct
  source 1..22: mol_type = other DNA
gcaattgattggtaaatttcga

SEQ ID NO: 9158 - DNA, 22 bp, synthetic construct
  misc_feature 1..22: note = Synthetic construct
  source 1..22: mol_type = other DNA
caattgattggtaaatttcgag

SEQ ID NO: 9159 - DNA, 22 bp, synthetic construct
  misc_feature 1..22: note = Synthetic construct
  source 1..22: mol_type = other DNA
aattgattggtaaatttcgaga

SEQ ID NO: 9160 - DNA, 22 bp, synthetic construct
  misc_feature 1..22: note = Synthetic construct
  source 1..22: mol_type = other DNA
attgattggtaaatttcgagag

SEQ ID NO: 9161 - DNA, 22 bp, synthetic construct
  misc_feature 1..22: note = Synthetic construct
  source 1..22: mol_type = other DNA
ttgattggtaaatttcgagaga

SEQ ID NO: 9162 - DNA, 22 bp, synthetic construct
  misc_feature 1..22: note = Synthetic construct
  source 1..22: mol_type = other DNA
tgattggtaaatttcgagagaa

SEQ ID NO: 9163 - DNA, 22 bp, synthetic construct
  misc_feature 1..22: note = Synthetic construct
  source 1..22: mol_type = other DNA
gattggtaaatttcgagagaaa

SEQ ID NO: 9164 - DNA, 22 bp, synthetic construct
  misc_feature 1..22: note = Synthetic construct
  source 1..22: mol_type = other DNA
attggtaaatttcgagagaaag

SEQ ID NO: 9165 - DNA, 22 bp, synthetic construct
  misc_feature 1..22: note = Synthetic construct
  source 1..22: mol_type = other DNA
ttggtaaatttcgagagaaaga

SEQ ID NO: 9166 - DNA, 22 bp, synthetic construct
  misc_feature 1..22: note = Synthetic construct
  source 1..22: mol_type = other DNA
tggtaaatttcgagagaaagat

SEQ ID NO: 9167 - DNA, 22 bp, synthetic construct
  misc_feature 1..22: note = Synthetic construct
  source 1..22: mol_type = other DNA
ggtaaatttcgagagaaagatc

SEQ ID NO: 9168 - DNA, 22 bp, synthetic construct
  misc_feature 1..22: note = Synthetic construct
  source 1..22: mol_type = other DNA
gtaaatttcgagagaaagatcg

SEQ ID NO: 9169 - DNA, 22 bp, synthetic construct
  misc_feature 1..22: note = Synthetic construct
  source 1..22: mol_type = other DNA
taaatttcgagagaaagatcgc

SEQ ID NO: 9170 - DNA, 22 bp, synthetic construct
  misc_feature 1..22: note = Synthetic construct
  source 1..22: mol_type = other DNA
aaatttcgagagaaagatcgcg

SEQ ID NO: 9171 - DNA, 22 bp, synthetic construct
  misc_feature 1..22: note = Synthetic construct
  source 1..22: mol_type = other DNA
aatttcgagagaaagatcgcga

SEQ ID NO: 9172 - DNA, 22 bp, synthetic construct
  misc_feature 1..22: note = Synthetic construct
  source 1..22: mol_type = other DNA
atttcgagagaaagatcgcgag

SEQ ID NO: 9173 - DNA, 22 bp, synthetic construct
  misc_feature 1..22: note = Synthetic construct
  source 1..22: mol_type = other DNA
tttcgagagaaagatcgcgagg

SEQ ID NO: 9174 - DNA, 22 bp, synthetic construct
  misc_feature 1..22: note = Synthetic construct
  source 1..22: mol_type = other DNA
ttcgagagaaagatcgcgagga

SEQ ID NO: 9175 - DNA, 22 bp, synthetic construct
  misc_feature 1..22: note = Synthetic construct
  source 1..22: mol_type = other DNA
tcgagagaaagatcgcgaggaa

SEQ ID NO: 9176 - DNA, 22 bp, synthetic construct
  misc_feature 1..22: note = Synthetic construct
  source 1..22: mol_type = other DNA
cgagagaaagatcgcgaggaag

SEQ ID NO: 9177 - DNA, 22 bp, synthetic construct
  misc_feature 1..22: note = Synthetic construct
  source 1..22: mol_type = other DNA
gagagaaagatcgcgaggaaga

SEQ ID NO: 9178 - DNA, 22 bp, synthetic construct
  misc_feature 1..22: note = Synthetic construct
  source 1..22: mol_type = other DNA
agagaaagatcgcgaggaagat

SEQ ID NO: 9179 - DNA, 22 bp, synthetic construct
  misc_feature 1..22: note = Synthetic construct
  source 1..22: mol_type = other DNA
gagaaagatcgcgaggaagatc

SEQ ID NO: 9180 - DNA, 22 bp, synthetic construct
  misc_feature 1..22: note = Synthetic construct
  source 1..22: mol_type = other DNA
agaaagatcgcgaggaagatca

SEQ ID NO: 9181 - DNA, 22 bp, synthetic construct
  misc_feature 1..22: note = Synthetic construct
  source 1..22: mol_type = other DNA
gaaagatcgcgaggaagatcaa

SEQ ID NO: 9182 - DNA, 22 bp, synthetic construct
  misc_feature 1..22: note = Synthetic construct
  source 1..22: mol_type = other DNA
aaagatcgcgaggaagatcaat

SEQ ID NO: 9183 - DNA, 22 bp, synthetic construct
  misc_feature 1..22: note = Synthetic construct
  source 1..22: mol_type = other DNA
aagatcgcgaggaagatcaata

SEQ ID NO: 9184 - DNA, 22 bp, synthetic construct
  misc_feature 1..22: note = Synthetic construct
  source 1..22: mol_type = other DNA
agatcgcgaggaagatcaatac

SEQ ID NO: 9185 - DNA, 22 bp, synthetic construct
  misc_feature 1..22: note = Synthetic construct
  source 1..22: mol_type = other DNA
gatcgcgaggaagatcaataca

SEQ ID NO: 9186 - DNA, 22 bp, synthetic construct
  misc_feature 1..22: note = Synthetic construct
  source 1..22: mol_type = other DNA
atcgcgaggaagatcaatacat

SEQ ID NO: 9187 - DNA, 22 bp, synthetic construct
  misc_feature 1..22: note = Synthetic construct
  source 1..22: mol_type = other DNA
tcgcgaggaagatcaatacata

SEQ ID NO: 9188 - DNA, 22 bp, synthetic construct
  misc_feature 1..22: note = Synthetic construct
  source 1..22: mol_type = other DNA
cgcgaggaagatcaatacataa

SEQ ID NO: 9189 - DNA, 22 bp, synthetic construct
  misc_feature 1..22: note = Synthetic construct
  source 1..22: mol_type = other DNA
gcgaggaagatcaatacataaa

SEQ ID NO: 9190 - DNA, 22 bp, synthetic construct
  misc_feature 1..22: note = Synthetic construct
  source 1..22: mol_type = other DNA
cgaggaagatcaatacataaag

SEQ ID NO: 9191 - DNA, 22 bp, synthetic construct
  misc_feature 1..22: note = Synthetic construct
  source 1..22: mol_type = other DNA
gaggaagatcaatacataaaga

SEQ ID NO: 9192 - DNA, 22 bp, synthetic construct
  misc_feature 1..22: note = Synthetic construct
  source 1..22: mol_type = other DNA
aggaagatcaatacataaagag

SEQ ID NO: 9193 - DNA, 22 bp, synthetic construct
  misc_feature 1..22: note = Synthetic construct
  source 1..22: mol_type = other DNA
ggaagatcaatacataaagagt

SEQ ID NO: 9194 - DNA, 22 bp, synthetic construct
  misc_feature 1..22: note = Synthetic construct
  source 1..22: mol_type = other DNA
gaagatcaatacataaagagtt

SEQ ID NO: 9195 - DNA, 22 bp, synthetic construct
  misc_feature 1..22: note = Synthetic construct
  source 1..22: mol_type = other DNA
aagatcaatacataaagagttg

SEQ ID NO: 9196 - DNA, 22 bp, synthetic construct
  misc_feature 1..22: note = Synthetic construct
  source 1..22: mol_type = other DNA
agatcaatacataaagagttga

SEQ ID NO: 9197 - DNA, 22 bp, synthetic construct
  misc_feature 1..22: note = Synthetic construct
  source 1..22: mol_type = other DNA
gatcaatacataaagagttgaa

SEQ ID NO: 9198 - DNA, 22 bp, synthetic construct
  misc_feature 1..22: note = Synthetic construct
  source 1..22: mol_type = other DNA
atcaatacataaagagttgaac

SEQ ID NO: 9199 - DNA, 22 bp, synthetic construct
  misc_feature 1..22: note = Synthetic construct
  source 1..22: mol_type = other DNA
tcaatacataaagagttgaact

SEQ ID NO: 9200 - DNA, 22 bp, synthetic construct
  misc_feature 1..22: note = Synthetic construct
  source 1..22: mol_type = other DNA
caatacataaagagttgaactt

SEQ ID NO: 9201 - DNA, 22 bp, synthetic construct
  misc_feature 1..22: note = Synthetic construct
  source 1..22: mol_type = other DNA
aatacataaagagttgaacttc

SEQ ID NO: 9202 - DNA, 22 bp, synthetic construct
  misc_feature 1..22: note = Synthetic construct
  source 1..22: mol_type = other DNA
atacataaagagttgaacttct

SEQ ID NO: 9203 - DNA, 22 bp, synthetic construct
  misc_feature 1..22: note = Synthetic construct
  source 1..22: mol_type = other DNA
tacataaagagttgaacttctt

SEQ ID NO: 9204 - DNA, 22 bp, synthetic construct
  misc_feature 1..22: note = Synthetic construct
  source 1..22: mol_type = other DNA
acataaagagttgaacttcttt

SEQ ID NO: 9205 - DNA, 22 bp, synthetic construct
  misc_feature 1..22: note = Synthetic construct
  source 1..22: mol_type = other DNA
cataaagagttgaacttctttg

SEQ ID NO: 9206 - DNA, 22 bp, synthetic construct
  misc_feature 1..22: note = Synthetic construct
  source 1..22: mol_type = other DNA
ataaagagttgaacttctttgt

SEQ ID NO: 9207 - DNA, 22 bp, synthetic construct
  misc_feature 1..22: note = Synthetic construct
  source 1..22: mol_type = other DNA
taaagagttgaacttctttgtt

SEQ ID NO: 9208 - DNA, 22 bp, synthetic construct
  misc_feature 1..22: note = Synthetic construct
  source 1..22: mol_type = other DNA
aaagagttgaacttctttgttg

SEQ ID NO: 9209 - DNA, 22 bp, synthetic construct
  misc_feature 1..22: note = Synthetic construct
  source 1..22: mol_type = other DNA
aagagttgaacttctttgttgt

SEQ ID NO: 9210 - DNA, 22 bp, synthetic construct
  misc_feature 1..22: note = Synthetic construct
  source 1..22: mol_type = other DNA
agagttgaacttctttgttgtc

SEQ ID NO: 9211 - DNA, 22 bp, synthetic construct
  misc_feature 1..22: note = Synthetic construct
  source 1..22: mol_type = other DNA
gagttgaacttctttgttgtct

SEQ ID NO: 9212 - DNA, 22 bp, synthetic construct
  misc_feature 1..22: note = Synthetic construct
  source 1..22: mol_type = other DNA
agttgaacttctttgttgtctt

SEQ ID NO: 9213 - DNA, 22 bp, synthetic construct
  misc_feature 1..22: note = Synthetic construct
  source 1..22: mol_type = other DNA
gttgaacttctttgttgtcttc

SEQ ID NO: 9214 - DNA, 22 bp, synthetic construct
  misc_feature 1..22: note = Synthetic construct
  source 1..22: mol_type = other DNA
ttgaacttctttgttgtcttcg

SEQ ID NO: 9215 - DNA, 22 bp, synthetic construct
  misc_feature 1..22: note = Synthetic construct
  source 1..22: mol_type = other DNA
tgaacttctttgttgtcttcga

SEQ ID NO: 9216 - DNA, 22 bp, synthetic construct
  misc_feature 1..22: note = Synthetic construct
  source 1..22: mol_type = other DNA
gaacttctttgttgtcttcgac

SEQ ID NO: 9217 - DNA, 22 bp, synthetic construct
  misc_feature 1..22: note = Synthetic construct
  source 1..22: mol_type = other DNA
aacttctttgttgtcttcgaca

SEQ ID NO: 9218 - DNA, 22 bp, synthetic construct
  misc_feature 1..22: note = Synthetic construct
  source 1..22: mol_type = other DNA
acttctttgttgtcttcgacat

SEQ ID NO: 9219 - DNA, 22 bp, synthetic construct
  misc_feature 1..22: note = Synthetic construct
  source 1..22: mol_type = other DNA
cttctttgttgtcttcgacatg

SEQ ID NO: 9220 - DNA, 22 bp, synthetic construct
  misc_feature 1..22: note = Synthetic construct
  source 1..22: mol_type = other DNA
ttctttgttgtcttcgacatgg

SEQ ID NO: 9221 - DNA, 22 bp, synthetic construct
  misc_feature 1..22: note = Synthetic construct
  source 1..22: mol_type = other DNA
tctttgttgtcttcgacatggg

SEQ ID NO: 9222 - DNA, 22 bp, synthetic construct
  misc_feature 1..22: note = Synthetic construct
  source 1..22: mol_type = other DNA
ctttgttgtcttcgacatgggt

SEQ ID NO: 9223 - DNA, 22 bp, synthetic construct
  misc_feature 1..22: note = Synthetic construct
  source 1..22: mol_type = other DNA
tttgttgtcttcgacatgggta

SEQ ID NO: 9224 - DNA, 22 bp, synthetic construct
  misc_feature 1..22: note = Synthetic construct
  source 1..22: mol_type = other DNA
ttgttgtcttcgacatgggtaa

SEQ ID NO: 9225 - DNA, 22 bp, synthetic construct
  misc_feature 1..22: note = Synthetic construct
  source 1..22: mol_type = other DNA
tgttgtcttcgacatgggtaat

SEQ ID NO: 9226 - DNA, 22 bp, synthetic construct
  misc_feature 1..22: note = Synthetic construct
  source 1..22: mol_type = other DNA
gttgtcttcgacatgggtaatc

SEQ ID NO: 9227 - DNA, 22 bp, synthetic construct
  misc_feature 1..22: note = Synthetic construct
  source 1..22: mol_type = other DNA
ttgtcttcgacatgggtaatcc

SEQ ID NO: 9228 - DNA, 22 bp, synthetic construct
  misc_feature 1..22: note = Synthetic construct
  source 1..22: mol_type = other DNA
tgtcttcgacatgggtaatcct

SEQ ID NO: 9229 - DNA, 22 bp, synthetic construct
  misc_feature 1..22: note = Synthetic construct
  source 1..22: mol_type = other DNA
gtcttcgacatgggtaatcctc

SEQ ID NO: 9230 - DNA, 22 bp, synthetic construct
  misc_feature 1..22: note = Synthetic construct
  source 1..22: mol_type = other DNA
tcttcgacatgggtaatcctca

SEQ ID NO: 9231 - DNA, 22 bp, synthetic construct
  misc_feature 1..22: note = Synthetic construct
  source 1..22: mol_type = other DNA
cttcgacatgggtaatcctcat

SEQ ID NO: 9232 - DNA, 22 bp, synthetic construct
  misc_feature 1..22: note = Synthetic construct
  source 1..22: mol_type = other DNA
ttcgacatgggtaatcctcatg

SEQ ID NO: 9233 - DNA, 22 bp, synthetic construct
  misc_feature 1..22: note = Synthetic construct
  source 1..22: mol_type = other DNA
tcgacatgggtaatcctcatgt

SEQ ID NO: 9234 - DNA, 22 bp, synthetic construct
  misc_feature 1..22: note = Synthetic construct
  source 1..22: mol_type = other DNA
cgacatgggtaatcctcatgtt

SEQ ID NO: 9235 - DNA, 22 bp, synthetic construct
  misc_feature 1..22: note = Synthetic construct
  source 1..22: mol_type = other DNA
gacatgggtaatcctcatgttt

SEQ ID NO: 9236 - DNA, 22 bp, synthetic construct
  misc_feature 1..22: note = Synthetic construct
  source 1..22: mol_type = other DNA
acatgggtaatcctcatgtttg

SEQ ID NO: 9237 - DNA, 22 bp, synthetic construct
  misc_feature 1..22: note = Synthetic construct
  source 1..22: mol_type = other DNA
catgggtaatcctcatgtttga

SEQ ID NO: 9238 - DNA, 22 bp, synthetic construct
  misc_feature 1..22: note = Synthetic construct
  source 1..22: mol_type = other DNA
atgggtaatcctcatgtttgaa

SEQ ID NO: 9239 - DNA, 22 bp, synthetic construct
  misc_feature 1..22: note = Synthetic construct
  source 1..22: mol_type = other DNA
tgggtaatcctcatgtttgaat

SEQ ID NO: 9240 - DNA, 22 bp, synthetic construct
  misc_feature 1..22: note = Synthetic construct
  source 1..22: mol_type = other DNA
gggtaatcctcatgtttgaatg

SEQ ID NO: 9241 - DNA, 22 bp, synthetic construct
  misc_feature 1..22: note = Synthetic construct
  source 1..22: mol_type = other DNA
ggtaatcctcatgtttgaatgg

SEQ ID NO: 9242 - DNA, 22 bp, synthetic construct
  misc_feature 1..22: note = Synthetic construct
  source 1..22: mol_type = other DNA
gtaatcctcatgtttgaatggc

SEQ ID NO: 9243 - DNA, 22 bp, synthetic construct
  misc_feature 1..22: note = Synthetic construct
  source 1..22: mol_type = other DNA
taatcctcatgtttgaatggcc

SEQ ID NO: 9244 - DNA, 22 bp, synthetic construct
  misc_feature 1..22: note = Synthetic construct
  source 1..22: mol_type = other DNA
aatcctcatgtttgaatggccg

SEQ ID NO: 9245 - DNA, 22 bp, synthetic construct
  misc_feature 1..22: note = Synthetic construct
  source 1..22: mol_type = other DNA
atcctcatgtttgaatggccgg

SEQ ID NO: 9246 - DNA, 22 bp, synthetic construct
  misc_feature 1..22: note = Synthetic construct
  source 1..22: mol_type = other DNA
tcctcatgtttgaatggccggc

SEQ ID NO: 9247 - DNA, 22 bp, synthetic construct
  misc_feature 1..22: note = Synthetic construct
  source 1..22: mol_type = other DNA
cctcatgtttgaatggccggcg

SEQ ID NO: 9248 - DNA, 22 bp, synthetic construct
  misc_feature 1..22: note = Synthetic construct
  source 1..22: mol_type = other DNA
ctcatgtttgaatggccggcgt

SEQ ID NO: 9249 - DNA, 22 bp, synthetic construct
  misc_feature 1..22: note = Synthetic construct
  source 1..22: mol_type = other DNA
tcatgtttgaatggccggcgtc

SEQ ID NO: 9250 - DNA, 22 bp, synthetic construct
  misc_feature 1..22: note = Synthetic construct
  source 1..22: mol_type = other DNA
catgtttgaatggccggcgtct

SEQ ID NO: 9251 - DNA, 22 bp, synthetic construct
  misc_feature 1..22: note = Synthetic construct
  source 1..22: mol_type = other DNA
atgtttgaatggccggcgtcta

SEQ ID NO: 9252 - DNA, 22 bp, synthetic construct
  misc_feature 1..22: note = Synthetic construct
  source 1..22: mol_type = other DNA
tgtttgaatggccggcgtctat

SEQ ID NO: 9253 - DNA, 22 bp, synthetic construct
  misc_feature 1..22: note = Synthetic construct
  source 1..22: mol_type = other DNA
gtttgaatggccggcgtctatt

SEQ ID NO: 9254 - DNA, 22 bp, synthetic construct
  misc_feature 1..22: note = Synthetic construct
  source 1..22: mol_type = other DNA
tttgaatggccggcgtctatta

SEQ ID NO: 9255 - DNA, 22 bp, synthetic construct
  misc_feature 1..22: note = Synthetic construct
  source 1..22: mol_type = other DNA
ttgaatggccggcgtctattag

SEQ ID NO: 9256 - DNA, 22 bp, synthetic construct
  misc_feature 1..22: note = Synthetic construct
  source 1..22: mol_type = other DNA
tgaatggccggcgtctattagt

SEQ ID NO: 9257 - DNA, 22 bp, synthetic construct
  misc_feature 1..22: note = Synthetic construct
  source 1..22: mol_type = other DNA
gaatggccggcgtctattagta

SEQ ID NO: 9258 - DNA, 22 bp, synthetic construct
  misc_feature 1..22: note = Synthetic construct
  source 1..22: mol_type = other DNA
aatggccggcgtctattagtag

SEQ ID NO: 9259 - DNA, 22 bp, synthetic construct
  misc_feature 1..22: note = Synthetic construct
  source 1..22: mol_type = other DNA
atggccggcgtctattagtaga

SEQ ID NO: 9260 - DNA, 22 bp, synthetic construct
  misc_feature 1..22: note = Synthetic construct
  source 1..22: mol_type = other DNA
tggccggcgtctattagtagat

SEQ ID NO: 9261 - DNA, 22 bp, synthetic construct
  misc_feature 1..22: note = Synthetic construct
  source 1..22: mol_type = other DNA
ggccggcgtctattagtagatg

SEQ ID NO: 9262 - DNA, 22 bp, synthetic construct
  misc_feature 1..22: note = Synthetic construct
  source 1..22: mol_type = other DNA
gccggcgtctattagtagatgc

SEQ ID NO: 9263 - DNA, 22 bp, synthetic construct
  misc_feature 1..22: note = Synthetic construct
  source 1..22: mol_type = other DNA
ccggcgtctattagtagatgcc

SEQ ID NO: 9264 - DNA, 22 bp, synthetic construct
  misc_feature 1..22: note = Synthetic construct
  source 1..22: mol_type = other DNA
cggcgtctattagtagatgccg

SEQ ID NO: 9265 - DNA, 22 bp, synthetic construct
  misc_feature 1..22: note = Synthetic construct
  source 1..22: mol_type = other DNA
ggcgtctattagtagatgccgg

SEQ ID NO: 9266 - DNA, 22 bp, synthetic construct
  misc_feature 1..22: note = Synthetic construct
  source 1..22: mol_type = other DNA
gcgtctattagtagatgccgga

SEQ ID NO: 9267 - DNA, 22 bp, synthetic construct
  misc_feature 1..22: note = Synthetic construct
  source 1..22: mol_type = other DNA
cgtctattagtagatgccggag

SEQ ID NO: 9268 - DNA, 22 bp, synthetic construct
  misc_feature 1..22: note = Synthetic construct
  source 1..22: mol_type = other DNA
gtctattagtagatgccggagt

SEQ ID NO: 9269 - DNA, 22 bp, synthetic construct
  misc_feature 1..22: note = Synthetic construct
  source 1..22: mol_type = other DNA
tctattagtagatgccggagtt

SEQ ID NO: 9270 - DNA, 22 bp, synthetic construct
  misc_feature 1..22: note = Synthetic construct
  source 1..22: mol_type = other DNA
ctattagtagatgccggagttt

SEQ ID NO: 9271 - DNA, 22 bp, synthetic construct
  misc_feature 1..22: note = Synthetic construct
  source 1..22: mol_type = other DNA
tattagtagatgccggagtttg

SEQ ID NO: 9272 - DNA, 22 bp, synthetic construct
  misc_feature 1..22: note = Synthetic construct
  source 1..22: mol_type = other DNA
attagtagatgccggagtttgc

SEQ ID NO: 9273 - DNA, 22 bp, synthetic construct
  misc_feature 1..22: note = Synthetic construct
  source 1..22: mol_type = other DNA
ttagtagatgccggagtttgct

SEQ ID NO: 9274 - DNA, 22 bp, synthetic construct
  misc_feature 1..22: note = Synthetic construct
  source 1..22: mol_type = other DNA
tagtagatgccggagtttgctg

SEQ ID NO: 9275 - DNA, 22 bp, synthetic construct
  misc_feature 1..22: note = Synthetic construct
  source 1..22: mol_type = other DNA
agtagatgccggagtttgctgc

SEQ ID NO: 9276 - DNA, 22 bp, synthetic construct
  misc_feature 1..22: note = Synthetic construct
  source 1..22: mol_type = other DNA
gtagatgccggagtttgctgcg

SEQ ID NO: 9277 - DNA, 22 bp, synthetic construct
  misc_feature 1..22: note = Synthetic construct
  source 1..22: mol_type = other DNA
tagatgccggagtttgctgcga

SEQ ID NO: 9278 - DNA, 22 bp, synthetic construct
  misc_feature 1..22: note = Synthetic construct
  source 1..22: mol_type = other DNA
agatgccggagtttgctgcgat

SEQ ID NO: 9279 - DNA, 22 bp, synthetic construct
  misc_feature 1..22: note = Synthetic construct
  source 1..22: mol_type = other DNA
gatgccggagtttgctgcgatt

SEQ ID NO: 9280 - DNA, 22 bp, synthetic construct
  misc_feature 1..22: note = Synthetic construct
  source 1..22: mol_type = other DNA
atgccggagtttgctgcgattg

SEQ ID NO: 9281 - DNA, 22 bp, synthetic construct
  misc_feature 1..22: note = Synthetic construct
  source 1..22: mol_type = other DNA
tgccggagtttgctgcgattgc

SEQ ID NO: 9282 - DNA, 22 bp, synthetic construct
  misc_feature 1..22: note = Synthetic construct
  source 1..22: mol_type = other DNA
gccggagtttgctgcgattgct

SEQ ID NO: 9283 - DNA, 22 bp, synthetic construct
  misc_feature 1..22: note = Synthetic construct
  source 1..22: mol_type = other DNA
ccggagtttgctgcgattgctg

SEQ ID NO: 9284 - DNA, 22 bp, synthetic construct
  misc_feature 1..22: note = Synthetic construct
  source 1..22: mol_type = other DNA
cggagtttgctgcgattgctga

SEQ ID NO: 9285 - DNA, 22 bp, synthetic construct
  misc_feature 1..22: note = Synthetic construct
  source 1..22: mol_type = other DNA
ggagtttgctgcgattgctgag

SEQ ID NO: 9286 - DNA, 22 bp, synthetic construct
  misc_feature 1..22: note = Synthetic construct
  source 1..22: mol_type = other DNA
gagtttgctgcgattgctgagg

SEQ ID NO: 9287 - DNA, 22 bp, synthetic construct
  misc_feature 1..22: note = Synthetic construct
  source 1..22: mol_type = other DNA
agtttgctgcgattgctgaggg

SEQ ID NO: 9288 - DNA, 22 bp, synthetic construct
  misc_feature 1..22: note = Synthetic construct
  source 1..22: mol_type = other DNA
gtttgctgcgattgctgaggga

SEQ ID NO: 9289 - DNA, 22 bp, synthetic construct
  misc_feature 1..22: note = Synthetic construct
  source 1..22: mol_type = other DNA
tttgctgcgattgctgagggaa

SEQ ID NO: 9290 - DNA, 22 bp, synthetic construct
  misc_feature 1..22: note = Synthetic construct
  source 1..22: mol_type = other DNA
ttgctgcgattgctgagggaat

SEQ ID NO: 9291 - DNA, 22 bp, synthetic construct
  misc_feature 1..22: note = Synthetic construct
  source 1..22: mol_type = other DNA
tgctgcgattgctgagggaatc

SEQ ID NO: 9292 - DNA, 22 bp, synthetic construct
  misc_feature 1..22: note = Synthetic construct
  source 1..22: mol_type = other DNA
gctgcgattgctgagggaatcg

SEQ ID NO: 9293 - DNA, 22 bp, synthetic construct
  misc_feature 1..22: note = Synthetic construct
  source 1..22: mol_type = other DNA
ctgcgattgctgagggaatcgg

SEQ ID NO: 9294 - DNA, 22 bp, synthetic construct
  misc_feature 1..22: note = Synthetic construct
  source 1..22: mol_type = other DNA
tgcgattgctgagggaatcggg

SEQ ID NO: 9295 - DNA, 22 bp, synthetic construct
  misc_feature 1..22: note = Synthetic construct
  source 1..22: mol_type = other DNA
gcgattgctgagggaatcgggt

SEQ ID NO: 9296 - DNA, 22 bp, synthetic construct
  misc_feature 1..22: note = Synthetic construct
  source 1..22: mol_type = other DNA
cgattgctgagggaatcgggtt

SEQ ID NO: 9297 - DNA, 22 bp, synthetic construct
  misc_feature 1..22: note = Synthetic construct
  source 1..22: mol_type = other DNA
gattgctgagggaatcgggttt

SEQ ID NO: 9298 - DNA, 22 bp, synthetic construct
  misc_feature 1..22: note = Synthetic construct
  source 1..22: mol_type = other DNA
attgctgagggaatcgggtttc

SEQ ID NO: 9299 - DNA, 22 bp, synthetic construct
  misc_feature 1..22: note = Synthetic construct
  source 1..22: mol_type = other DNA
ttgctgagggaatcgggtttcc

SEQ ID NO: 9300 - DNA, 22 bp, synthetic construct
  misc_feature 1..22: note = Synthetic construct
  source 1..22: mol_type = other DNA
tgctgagggaatcgggtttcca

SEQ ID NO: 9301 - DNA, 22 bp, synthetic construct
  misc_feature 1..22: note = Synthetic construct
  source 1..22: mol_type = other DNA
gctgagggaatcgggtttccat

SEQ ID NO: 9302 - DNA, 22 bp, synthetic construct
  misc_feature 1..22: note = Synthetic construct
  source 1..22: mol_type = other DNA
ctgagggaatcgggtttccatc

SEQ ID NO: 9303 - DNA, 22 bp, synthetic construct
  misc_feature 1..22: note = Synthetic construct
  source 1..22: mol_type = other DNA
tgagggaatcgggtttccatct

SEQ ID NO: 9304 - DNA, 22 bp, synthetic construct
  misc_feature 1..22: note = Synthetic construct
  source 1..22: mol_type = other DNA
gagggaatcgggtttccatctt

SEQ ID NO: 9305 - DNA, 22 bp, synthetic construct
  misc_feature 1..22: note = Synthetic construct
  source 1..22: mol_type = other DNA
agggaatcgggtttccatcttt

SEQ ID NO: 9306 - DNA, 22 bp, synthetic construct
  misc_feature 1..22: note = Synthetic construct
  source 1..22: mol_type = other DNA
gggaatcgggtttccatctttt

SEQ ID NO: 9307 - DNA, 22 bp, synthetic construct
  misc_feature 1..22: note = Synthetic construct
  source 1..22: mol_type = other DNA
ggaatcgggtttccatctttta

SEQ ID NO: 9308 - DNA, 22 bp, synthetic construct
  misc_feature 1..22: note = Synthetic construct
  source 1..22: mol_type = other DNA
gaatcgggtttccatcttttag

SEQ ID NO: 9309 - DNA, 22 bp, synthetic construct
  misc_feature 1..22: note = Synthetic construct
  source 1..22: mol_type = other DNA
aatcgggtttccatcttttagg

SEQ ID NO: 9310 - DNA, 22 bp, synthetic construct
  misc_feature 1..22: note = Synthetic construct
  source 1..22: mol_type = other DNA
atcgggtttccatcttttagga

SEQ ID NO: 9311 - DNA, 22 bp, synthetic construct
  misc_feature 1..22: note = Synthetic construct
  source 1..22: mol_type = other DNA
tcgggtttccatcttttaggag

SEQ ID NO: 9312 - DNA, 22 bp, synthetic construct
  misc_feature 1..22: note = Synthetic construct
  source 1..22: mol_type = other DNA
cgggtttccatcttttaggaga

SEQ ID NO: 9313 - DNA, 22 bp, synthetic construct
  misc_feature 1..22: note = Synthetic construct
  source 1..22: mol_type = other DNA
gggtttccatcttttaggagac

SEQ ID NO: 9314 - DNA, 22 bp, synthetic construct
  misc_feature 1..22: note = Synthetic construct
  source 1..22: mol_type = other DNA
ggtttccatcttttaggagacc

SEQ ID NO: 9315 - DNA, 22 bp, synthetic construct
  misc_feature 1..22: note = Synthetic construct
  source 1..22: mol_type = other DNA
gtttccatcttttaggagacct

SEQ ID NO: 9316 - DNA, 22 bp, synthetic construct
  misc_feature 1..22: note = Synthetic construct
  source 1..22: mol_type = other DNA
tttccatcttttaggagacctt

SEQ ID NO: 9317 - DNA, 22 bp, synthetic construct
  misc_feature 1..22: note = Synthetic construct
  source 1..22: mol_type = other DNA
ttccatcttttaggagaccttg

SEQ ID NO: 9318 - DNA, 22 bp, synthetic construct
  misc_feature 1..22: note = Synthetic construct
  source 1..22: mol_type = other DNA
tccatcttttaggagaccttgc

SEQ ID NO: 9319 - DNA, 22 bp, synthetic construct
  misc_feature 1..22: note = Synthetic construct
  source 1..22: mol_type = other DNA
ccatcttttaggagaccttgca

SEQ ID NO: 9320 - DNA, 22 bp, synthetic construct
  misc_feature 1..22: note = Synthetic construct
  source 1..22: mol_type = other DNA
catcttttaggagaccttgcat

SEQ ID NO: 9321 - DNA, 22 bp, synthetic construct
  misc_feature 1..22: note = Synthetic construct
  source 1..22: mol_type = other DNA
atcttttaggagaccttgcatt

SEQ ID NO: 9322 - DNA, 22 bp, synthetic construct
  misc_feature 1..22: note = Synthetic construct
  source 1..22: mol_type = other DNA
tcttttaggagaccttgcattg

SEQ ID NO: 9323 - DNA, 22 bp, synthetic construct
  misc_feature 1..22: note = Synthetic construct
  source 1..22: mol_type = other DNA
cttttaggagaccttgcattgc

SEQ ID NO: 9324 - DNA, 22 bp, synthetic construct
  misc_feature 1..22: note = Synthetic construct
  source 1..22: mol_type = other DNA
ttttaggagaccttgcattgcc

SEQ ID NO: 9325 - DNA, 22 bp, synthetic construct
  misc_feature 1..22: note = Synthetic construct
  source 1..22: mol_type = other DNA
tttaggagaccttgcattgcct

SEQ ID NO: 9326 - DNA, 22 bp, synthetic construct
  misc_feature 1..22: note = Synthetic construct
  source 1..22: mol_type = other DNA
ttaggagaccttgcattgcctt

SEQ ID NO: 9327 - DNA, 22 bp, synthetic construct
  misc_feature 1..22: note = Synthetic construct
  source 1..22: mol_type = other DNA
taggagaccttgcattgcctta

SEQ ID NO: 9328 - DNA, 22 bp, synthetic construct
  misc_feature 1..22: note = Synthetic construct
  source 1..22: mol_type = other DNA
aggagaccttgcattgccttaa

SEQ ID NO: 9329 - DNA, 22 bp, synthetic construct
  misc_feature 1..22: note = Synthetic construct
  source 1..22: mol_type = other DNA
ggagaccttgcattgccttaac

SEQ ID NO: 9330 - DNA, 22 bp, synthetic construct
  misc_feature 1..22: note = Synthetic construct
  source 1..22: mol_type = other DNA
gagaccttgcattgccttaaca

SEQ ID NO: 9331 - DNA, 22 bp, synthetic construct
  misc_feature 1..22: note = Synthetic construct
  source 1..22: mol_type = other DNA
agaccttgcattgccttaacaa

SEQ ID NO: 9332 - DNA, 22 bp, synthetic construct
  misc_feature 1..22: note = Synthetic construct
  source 1..22: mol_type = other DNA
gaccttgcattgccttaacaat

SEQ ID NO: 9333 - DNA, 22 bp, synthetic construct
  misc_feature 1..22: note = Synthetic construct
  source 1..22: mol_type = other DNA
accttgcattgccttaacaata

SEQ ID NO: 9334 - DNA, 22 bp, synthetic construct
  misc_feature 1..22: note = Synthetic construct
  source 1..22: mol_type = other DNA
ccttgcattgccttaacaataa

SEQ ID NO: 9335 - DNA, 22 bp, synthetic construct
  misc_feature 1..22: note = Synthetic construct
  source 1..22: mol_type = other DNA
cttgcattgccttaacaataag

SEQ ID NO: 9336 - DNA, 22 bp, synthetic construct
  misc_feature 1..22: note = Synthetic construct
  source 1..22: mol_type = other DNA
ttgcattgccttaacaataagc

SEQ ID NO: 9337 - DNA, 22 bp, synthetic construct
  misc_feature 1..22: note = Synthetic construct
  source 1..22: mol_type = other DNA
tgcattgccttaacaataagct

SEQ ID NO: 9338 - DNA, 22 bp, synthetic construct
  misc_feature 1..22: note = Synthetic construct
  source 1..22: mol_type = other DNA
gcattgccttaacaataagctc

SEQ ID NO: 9339 - DNA, 22 bp, synthetic construct
  misc_feature 1..22: note = Synthetic construct
  source 1..22: mol_type = other DNA
cattgccttaacaataagctcg

SEQ ID NO: 9340 - DNA, 22 bp, synthetic construct
  misc_feature 1..22: note = Synthetic construct
  source 1..22: mol_type = other DNA
attgccttaacaataagctcgc

SEQ ID NO: 9341 - DNA, 22 bp, synthetic construct
  misc_feature 1..22: note = Synthetic construct
  source 1..22: mol_type = other DNA
ttgccttaacaataagctcgca

SEQ ID NO: 9342 - DNA, 22 bp, synthetic construct
  misc_feature 1..22: note = Synthetic construct
  source 1..22: mol_type = other DNA
tgccttaacaataagctcgcag

SEQ ID NO: 9343 - DNA, 22 bp, synthetic construct
  misc_feature 1..22: note = Synthetic construct
  source 1..22: mol_type = other DNA
gccttaacaataagctcgcagt

SEQ ID NO: 9344 - DNA, 22 bp, synthetic construct
  misc_feature 1..22: note = Synthetic construct
  source 1..22: mol_type = other DNA
ccttaacaataagctcgcagtc

SEQ ID NO: 9345 - DNA, 22 bp, synthetic construct
  misc_feature 1..22: note = Synthetic construct
  source 1..22: mol_type = other DNA
cttaacaataagctcgcagtcg

SEQ ID NO: 9346 - DNA, 22 bp, synthetic construct
  misc_feature 1..22: note = Synthetic construct
  source 1..22: mol_type = other DNA
ttaacaataagctcgcagtcgg

SEQ ID NO: 9347 - DNA, 22 bp, synthetic construct
  misc_feature 1..22: note = Synthetic construct
  source 1..22: mol_type = other DNA
taacaataagctcgcagtcgga

SEQ ID NO: 9348 - DNA, 22 bp, synthetic construct
  misc_feature 1..22: note = Synthetic construct
  source 1..22: mol_type = other DNA
aacaataagctcgcagtcggaa

SEQ ID NO: 9349 - DNA, 22 bp, synthetic construct
  misc_feature 1..22: note = Synthetic construct
  source 1..22: mol_type = other DNA
acaataagctcgcagtcggaat

SEQ ID NO: 9350 - DNA, 22 bp, synthetic construct
  misc_feature 1..22: note = Synthetic construct
  source 1..22: mol_type = other DNA
caataagctcgcagtcggaatt

SEQ ID NO: 9351 - DNA, 22 bp, synthetic construct
  misc_feature 1..22: note = Synthetic construct
  source 1..22: mol_type = other DNA
aataagctcgcagtcggaattc

SEQ ID NO: 9352 - DNA, 22 bp, synthetic construct
  misc_feature 1..22: note = Synthetic construct
  source 1..22: mol_type = other DNA
ataagctcgcagtcggaattcg

SEQ ID NO: 9353 - DNA, 22 bp, synthetic construct
  misc_feature 1..22: note = Synthetic construct
  source 1..22: mol_type = other DNA
taagctcgcagtcggaattcgt

SEQ ID NO: 9354 - DNA, 22 bp, synthetic construct
  misc_feature 1..22: note = Synthetic construct
  source 1..22: mol_type = other DNA
aagctcgcagtcggaattcgta

SEQ ID NO: 9355 - DNA, 22 bp, synthetic construct
  misc_feature 1..22: note = Synthetic construct
  source 1..22: mol_type = other DNA
agctcgcagtcggaattcgtag

SEQ ID NO: 9356 - DNA, 22 bp, synthetic construct
  misc_feature 1..22: note = Synthetic construct
  source 1..22: mol_type = other DNA
gctcgcagtcggaattcgtagc

SEQ ID NO: 9357 - DNA, 22 bp, synthetic construct
  misc_feature 1..22: note = Synthetic construct
  source 1..22: mol_type = other DNA
ctcgcagtcggaattcgtagcg

SEQ ID NO: 9358 - DNA, 22 bp, synthetic construct
  misc_feature 1..22: note = Synthetic construct
  source 1..22: mol_type = other DNA
tcgcagtcggaattcgtagcga

SEQ ID NO: 9359 - DNA, 22 bp, synthetic construct
  misc_feature 1..22: note = Synthetic construct
  source 1..22: mol_type = other DNA
cgcagtcggaattcgtagcgaa

SEQ ID NO: 9360 - DNA, 22 bp, synthetic construct
  misc_feature 1..22: note = Synthetic construct
  source 1..22: mol_type = other DNA
gcagtcggaattcgtagcgaaa

SEQ ID NO: 9361 - DNA, 22 bp, synthetic construct
  misc_feature 1..22: note = Synthetic construct
  source 1..22: mol_type = other DNA
cagtcggaattcgtagcgaaaa

SEQ ID NO: 9362 - DNA, 22 bp, synthetic construct
  misc_feature 1..22: note = Synthetic construct
  source 1..22: mol_type = other DNA
agtcggaattcgtagcgaaaat

SEQ ID NO: 9363 - DNA, 22 bp, synthetic construct
  misc_feature 1..22: note = Synthetic construct
  source 1..22: mol_type = other DNA
gtcggaattcgtagcgaaaatt

SEQ ID NO: 9364 - DNA, 22 bp, synthetic construct
  misc_feature 1..22: note = Synthetic construct
  source 1..22: mol_type = other DNA
tcggaattcgtagcgaaaattg

SEQ ID NO: 9365 - DNA, 22 bp, synthetic construct
  misc_feature 1..22: note = Synthetic construct
  source 1..22: mol_type = other DNA
cggaattcgtagcgaaaattgg

SEQ ID NO: 9366 - DNA, 22 bp, synthetic construct
  misc_feature 1..22: note = Synthetic construct
  source 1..22: mol_type = other DNA
ggaattcgtagcgaaaattgga

SEQ ID NO: 9367 - DNA, 22 bp, synthetic construct
  misc_feature 1..22: note = Synthetic construct
  source 1..22: mol_type = other DNA
gaattcgtagcgaaaattggaa

SEQ ID NO: 9368 - DNA, 22 bp, synthetic construct
  misc_feature 1..22: note = Synthetic construct
  source 1..22: mol_type = other DNA
aattcgtagcgaaaattggaat

SEQ ID NO: 9369 - DNA, 22 bp, synthetic construct
  misc_feature 1..22: note = Synthetic construct
  source 1..22: mol_type = other DNA
attcgtagcgaaaattggaatg

SEQ ID NO: 9370 - DNA, 22 bp, synthetic construct
  misc_feature 1..22: note = Synthetic construct
  source 1..22: mol_type = other DNA
ttcgtagcgaaaattggaatgg

SEQ ID NO: 9371 - DNA, 22 bp, synthetic construct
  misc_feature 1..22: note = Synthetic construct
  source 1..22: mol_type = other DNA
tcgtagcgaaaattggaatggt

SEQ ID NO: 9372 - DNA, 22 bp, synthetic construct
  misc_feature 1..22: note = Synthetic construct
  source 1..22: mol_type = other DNA
cgtagcgaaaattggaatggtt

SEQ ID NO: 9373 - DNA, 22 bp, synthetic construct
  misc_feature 1..22: note = Synthetic construct
  source 1..22: mol_type = other DNA
gtagcgaaaattggaatggtta

SEQ ID NO: 9374 - DNA, 22 bp, synthetic construct
  misc_feature 1..22: note = Synthetic construct
  source 1..22: mol_type = other DNA
tagcgaaaattggaatggttag

SEQ ID NO: 9375 - DNA, 22 bp, synthetic construct
  misc_feature 1..22: note = Synthetic construct
  source 1..22: mol_type = other DNA
agcgaaaattggaatggttagt

SEQ ID NO: 9376 - DNA, 22 bp, synthetic construct
  misc_feature 1..22: note = Synthetic construct
  source 1..22: mol_type = other DNA
gcgaaaattggaatggttagtt

SEQ ID NO: 9377 - DNA, 22 bp, synthetic construct
  misc_feature 1..22: note = Synthetic construct
  source 1..22: mol_type = other DNA
cgaaaattggaatggttagttc

SEQ ID NO: 9378 - DNA, 22 bp, synthetic construct
  misc_feature 1..22: note = Synthetic construct
  source 1..22: mol_type = other DNA
gaaaattggaatggttagttcc

SEQ ID NO: 9379 - DNA, 22 bp, synthetic construct
  misc_feature 1..22: note = Synthetic construct
  source 1..22: mol_type = other DNA
aaaattggaatggttagttcca

SEQ ID NO: 9380 - DNA, 22 bp, synthetic construct
  misc_feature 1..22: note = Synthetic construct
  source 1..22: mol_type = other DNA
aaattggaatggttagttccat

SEQ ID NO: 9381 - DNA, 22 bp, synthetic construct
  misc_feature 1..22: note = Synthetic construct
  source 1..22: mol_type = other DNA
aattggaatggttagttccata

SEQ ID NO: 9382 - DNA, 22 bp, synthetic construct
  misc_feature 1..22: note = Synthetic construct
  source 1..22: mol_type = other DNA
attggaatggttagttccatat

SEQ ID NO: 9383 - DNA, 22 bp, synthetic construct
  misc_feature 1..22: note = Synthetic construct
  source 1..22: mol_type = other DNA
ttggaatggttagttccatatt

SEQ ID NO: 9384 - DNA, 22 bp, synthetic construct
  misc_feature 1..22: note = Synthetic construct
  source 1..22: mol_type = other DNA
tggaatggttagttccatattt

SEQ ID NO: 9385 - DNA, 22 bp, synthetic construct
  misc_feature 1..22: note = Synthetic construct
  source 1..22: mol_type = other DNA
ggaatggttagttccatattta

SEQ ID NO: 9386 - DNA, 22 bp, synthetic construct
  misc_feature 1..22: note = Synthetic construct
  source 1..22: mol_type = other DNA
gaatggttagttccatatttaa

SEQ ID NO: 9387 - DNA, 22 bp, synthetic construct
  misc_feature 1..22: note = Synthetic construct
  source 1..22: mol_type = other DNA
aatggttagttccatatttaag

SEQ ID NO: 9388 - DNA, 22 bp, synthetic construct
  misc_feature 1..22: note = Synthetic construct
  source 1..22: mol_type = other DNA
atggttagttccatatttaagt

SEQ ID NO: 9389 - DNA, 22 bp, synthetic construct
  misc_feature 1..22: note = Synthetic construct
  source 1..22: mol_type = other DNA
tggttagttccatatttaagta

SEQ ID NO: 9390 - DNA, 22 bp, synthetic construct
  misc_feature 1..22: note = Synthetic construct
  source 1..22: mol_type = other DNA
ggttagttccatatttaagtac

SEQ ID NO: 9391 - DNA, 22 bp, synthetic construct
  misc_feature 1..22: note = Synthetic construct
  source 1..22: mol_type = other DNA
gttagttccatatttaagtacg

SEQ ID NO: 9392 - DNA, 22 bp, synthetic construct
  misc_feature 1..22: note = Synthetic construct
  source 1..22: mol_type = other DNA
ttagttccatatttaagtacga

SEQ ID NO: 9393 - DNA, 22 bp, synthetic construct
  misc_feature 1..22: note = Synthetic construct
  source 1..22: mol_type = other DNA
tagttccatatttaagtacgaa

SEQ ID NO: 9394 - DNA, 22 bp, synthetic construct
  misc_feature 1..22: note = Synthetic construct
  source 1..22: mol_type = other DNA
agttccatatttaagtacgaac

SEQ ID NO: 9395 - DNA, 22 bp, synthetic construct
  misc_feature 1..22: note = Synthetic construct
  source 1..22: mol_type = other DNA
gttccatatttaagtacgaacg

SEQ ID NO: 9396 - DNA, 22 bp, synthetic construct
  misc_feature 1..22: note = Synthetic construct
  source 1..22: mol_type = other DNA
ttccatatttaagtacgaacgc

SEQ ID NO: 9397 - DNA, 22 bp, synthetic construct
  misc_feature 1..22: note = Synthetic construct
  source 1..22: mol_type = other DNA
tccatatttaagtacgaacgcc

SEQ ID NO: 9398 - DNA, 22 bp, synthetic construct
  misc_feature 1..22: note = Synthetic construct
  source 1..22: mol_type = other DNA
ccatatttaagtacgaacgcca

SEQ ID NO: 9399 - DNA, 22 bp, synthetic construct
  misc_feature 1..22: note = Synthetic construct
  source 1..22: mol_type = other DNA
catatttaagtacgaacgccat

SEQ ID NO: 9400 - DNA, 22 bp, synthetic construct
  misc_feature 1..22: note = Synthetic construct
  source 1..22: mol_type = other DNA
atatttaagtacgaacgccatg

SEQ ID NO: 9401 - DNA, 22 bp, synthetic construct
  misc_feature 1..22: note = Synthetic construct
  source 1..22: mol_type = other DNA
tatttaagtacgaacgccatgc

SEQ ID NO: 9402 - DNA, 22 bp, synthetic construct
  misc_feature 1..22: note = Synthetic construct
  source 1..22: mol_type = other DNA
atttaagtacgaacgccatgcg

SEQ ID NO: 9403 - DNA, 22 bp, synthetic construct
  misc_feature 1..22: note = Synthetic construct
  source 1..22: mol_type = other DNA
tttaagtacgaacgccatgcgg

SEQ ID NO: 9404 - DNA, 22 bp, synthetic construct
  misc_feature 1..22: note = Synthetic construct
  source 1..22: mol_type = other DNA
ttaagtacgaacgccatgcggc

SEQ ID NO: 9405 - DNA, 22 bp, synthetic construct
  misc_feature 1..22: note = Synthetic construct
  source 1..22: mol_type = other DNA
taagtacgaacgccatgcggct

SEQ ID NO: 9406 - DNA, 22 bp, synthetic construct
  misc_feature 1..22: note = Synthetic construct
  source 1..22: mol_type = other DNA
aagtacgaacgccatgcggcta

SEQ ID NO: 9407 - DNA, 22 bp, synthetic construct
  misc_feature 1..22: note = Synthetic construct
  source 1..22: mol_type = other DNA
agtacgaacgccatgcggctac

SEQ ID NO: 9408 - DNA, 22 bp, synthetic construct
  misc_feature 1..22: note = Synthetic construct
  source 1..22: mol_type = other DNA
gtacgaacgccatgcggctaca

SEQ ID NO: 9409 - DNA, 22 bp, synthetic construct
  misc_feature 1..22: note = Synthetic construct
  source 1..22: mol_type = other DNA
tacgaacgccatgcggctacag

SEQ ID NO: 9410 - DNA, 22 bp, synthetic construct
  misc_feature 1..22: note = Synthetic construct
  source 1..22: mol_type = other DNA
acgaacgccatgcggctacagg

SEQ ID NO: 9411 - DNA, 22 bp, synthetic construct
  misc_feature 1..22: note = Synthetic construct
  source 1..22: mol_type = other DNA
cgaacgccatgcggctacagga

SEQ ID NO: 9412 - DNA, 22 bp, synthetic construct
  misc_feature 1..22: note = Synthetic construct
  source 1..22: mol_type = other DNA
gaacgccatgcggctacaggaa

SEQ ID NO: 9413 - DNA, 22 bp, synthetic construct
  misc_feature 1..22: note = Synthetic construct
  source 1..22: mol_type = other DNA
aacgccatgcggctacaggaag

SEQ ID NO: 9414 - DNA, 22 bp, synthetic construct
  misc_feature 1..22: note = Synthetic construct
  source 1..22: mol_type = other DNA
acgccatgcggctacaggaagc

SEQ ID NO: 9415 - DNA, 22 bp, synthetic construct
  misc_feature 1..22: note = Synthetic construct
  source 1..22: mol_type = other DNA
cgccatgcggctacaggaagct

SEQ ID NO: 9416 - DNA, 22 bp, synthetic construct
  misc_feature 1..22: note = Synthetic construct
  source 1..22: mol_type = other DNA
gccatgcggctacaggaagctc

SEQ ID NO: 9417 - DNA, 22 bp, synthetic construct
  misc_feature 1..22: note = Synthetic construct
  source 1..22: mol_type = other DNA
ccatgcggctacaggaagctct

SEQ ID NO: 9418 - DNA, 22 bp, synthetic construct
  misc_feature 1..22: note = Synthetic construct
  source 1..22: mol_type = other DNA
catgcggctacaggaagctcta

SEQ ID NO: 9419 - DNA, 22 bp, synthetic construct
  misc_feature 1..22: note = Synthetic construct
  source 1..22: mol_type = other DNA
atgcggctacaggaagctctac

SEQ ID NO: 9420 - DNA, 22 bp, synthetic construct
  misc_feature 1..22: note = Synthetic construct
  source 1..22: mol_type = other DNA
tgcggctacaggaagctctaca

SEQ ID NO: 9421 - DNA, 22 bp, synthetic construct
  misc_feature 1..22: note = Synthetic construct
  source 1..22: mol_type = other DNA
gcggctacaggaagctctacac

SEQ ID NO: 9422 - DNA, 22 bp, synthetic construct
  misc_feature 1..22: note = Synthetic construct
  source 1..22: mol_type = other DNA
cggctacaggaagctctacacc

SEQ ID NO: 9423 - DNA, 22 bp, synthetic construct
  misc_feature 1..22: note = Synthetic construct
  source 1..22: mol_type = other DNA
ggctacaggaagctctacacca

SEQ ID NO: 9424 - DNA, 22 bp, synthetic construct
  misc_feature 1..22: note = Synthetic construct
  source 1..22: mol_type = other DNA
gctacaggaagctctacaccac

SEQ ID NO: 9425 - DNA, 22 bp, synthetic construct
  misc_feature 1..22: note = Synthetic construct
  source 1..22: mol_type = other DNA
ctacaggaagctctacaccacc

SEQ ID NO: 9426 - DNA, 22 bp, synthetic construct
  misc_feature 1..22: note = Synthetic construct
  source 1..22: mol_type = other DNA
tacaggaagctctacaccacca

SEQ ID NO: 9427 - DNA, 22 bp, synthetic construct
  misc_feature 1..22: note = Synthetic construct
  source 1..22: mol_type = other DNA
acaggaagctctacaccaccaa

SEQ ID NO: 9428 - DNA, 22 bp, synthetic construct
  misc_feature 1..22: note = Synthetic construct
  source 1..22: mol_type = other DNA
caggaagctctacaccaccaac

SEQ ID NO: 9429 - DNA, 22 bp, synthetic construct
  misc_feature 1..22: note = Synthetic construct
  source 1..22: mol_type = other DNA
aggaagctctacaccaccaaca

SEQ ID NO: 9430 - DNA, 22 bp, synthetic construct
  misc_feature 1..22: note = Synthetic construct
  source 1..22: mol_type = other DNA
ggaagctctacaccaccaacag

SEQ ID NO: 9431 - DNA, 22 bp, synthetic construct
  misc_feature 1..22: note = Synthetic construct
  source 1..22: mol_type = other DNA
gaagctctacaccaccaacagt

SEQ ID NO: 9432 - DNA, 22 bp, synthetic construct
  misc_feature 1..22: note = Synthetic construct
  source 1..22: mol_type = other DNA
aagctctacaccaccaacagtc

SEQ ID NO: 9433 - DNA, 22 bp, synthetic construct
  misc_feature 1..22: note = Synthetic construct
  source 1..22: mol_type = other DNA
agctctacaccaccaacagtct

SEQ ID NO: 9434 - DNA, 22 bp, synthetic construct
  misc_feature 1..22: note = Synthetic construct
  source 1..22: mol_type = other DNA
gctctacaccaccaacagtctg

SEQ ID NO: 9435 - DNA, 22 bp, synthetic construct
  misc_feature 1..22: note = Synthetic construct
  source 1..22: mol_type = other DNA
ctctacaccaccaacagtctgg

SEQ ID NO: 9436 - DNA, 22 bp, synthetic construct
  misc_feature 1..22: note = Synthetic construct
  source 1..22: mol_type = other DNA
tctacaccaccaacagtctggg

SEQ ID NO: 9437 - DNA, 22 bp, synthetic construct
  misc_feature 1..22: note = Synthetic construct
  source 1..22: mol_type = other DNA
ctacaccaccaacagtctgggt

SEQ ID NO: 9438 - DNA, 22 bp, synthetic construct
  misc_feature 1..22: note = Synthetic construct
  source 1..22: mol_type = other DNA
tacaccaccaacagtctgggtt

SEQ ID NO: 9439 - DNA, 22 bp, synthetic construct
  misc_feature 1..22: note = Synthetic construct
  source 1..22: mol_type = other DNA
acaccaccaacagtctgggttg

SEQ ID NO: 9440 - DNA, 22 bp, synthetic construct
  misc_feature 1..22: note = Synthetic construct
  source 1..22: mol_type = other DNA
caccaccaacagtctgggttgc

SEQ ID NO: 9441 - DNA, 22 bp, synthetic construct
  misc_feature 1..22: note = Synthetic construct
  source 1..22: mol_type = other DNA
accaccaacagtctgggttgcc

SEQ ID NO: 9442 - DNA, 22 bp, synthetic construct
  misc_feature 1..22: note = Synthetic construct
  source 1..22: mol_type = other DNA
ccaccaacagtctgggttgcca

SEQ ID NO: 9443 - DNA, 22 bp, synthetic construct
  misc_feature 1..22: note = Synthetic construct
  source 1..22: mol_type = other DNA
caccaacagtctgggttgccac

SEQ ID NO: 9444 - DNA, 22 bp, synthetic construct
  misc_feature 1..22: note = Synthetic construct
  source 1..22: mol_type = other DNA
accaacagtctgggttgccact

SEQ ID NO: 9445 - DNA, 22 bp, synthetic construct
  misc_feature 1..22: note = Synthetic construct
  source 1..22: mol_type = other DNA
ccaacagtctgggttgccactt

SEQ ID NO: 9446 - DNA, 22 bp, synthetic construct
  misc_feature 1..22: note = Synthetic construct
  source 1..22: mol_type = other DNA
caacagtctgggttgccacttt

SEQ ID NO: 9447 - DNA, 22 bp, synthetic construct
  misc_feature 1..22: note = Synthetic construct
  source 1..22: mol_type = other DNA
aacagtctgggttgccacttta

SEQ ID NO: 9448 - DNA, 22 bp, synthetic construct
  misc_feature 1..22: note = Synthetic construct
  source 1..22: mol_type = other DNA
acagtctgggttgccactttag

SEQ ID NO: 9449 - DNA, 22 bp, synthetic construct
  misc_feature 1..22: note = Synthetic construct
  source 1..22: mol_type = other DNA
cagtctgggttgccactttagg

SEQ ID NO: 9450 - DNA, 22 bp, synthetic construct
  misc_feature 1..22: note = Synthetic construct
  source 1..22: mol_type = other DNA
agtctgggttgccactttaggc

SEQ ID NO: 9451 - DNA, 22 bp, synthetic construct
  misc_feature 1..22: note = Synthetic construct
  source 1..22: mol_type = other DNA
gtctgggttgccactttaggca

SEQ ID NO: 9452 - DNA, 22 bp, synthetic construct
  misc_feature 1..22: note = Synthetic construct
  source 1..22: mol_type = other DNA
tctgggttgccactttaggcac

SEQ ID NO: 9453 - DNA, 22 bp, synthetic construct
  misc_feature 1..22: note = Synthetic construct
  source 1..22: mol_type = other DNA
ctgggttgccactttaggcacc

SEQ ID NO: 9454 - DNA, 22 bp, synthetic construct
  misc_feature 1..22: note = Synthetic construct
  source 1..22: mol_type = other DNA
tgggttgccactttaggcacct

SEQ ID NO: 9455 - DNA, 22 bp, synthetic construct
  misc_feature 1..22: note = Synthetic construct
  source 1..22: mol_type = other DNA
gggttgccactttaggcacctc

SEQ ID NO: 9456 - DNA, 22 bp, synthetic construct
  misc_feature 1..22: note = Synthetic construct
  source 1..22: mol_type = other DNA
ggttgccactttaggcacctcg

SEQ ID NO: 9457 - DNA, 22 bp, synthetic construct
  misc_feature 1..22: note = Synthetic construct
  source 1..22: mol_type = other DNA
gttgccactttaggcacctcga

SEQ ID NO: 9458 - DNA, 22 bp, synthetic construct
  misc_feature 1..22: note = Synthetic construct
  source 1..22: mol_type = other DNA
ttgccactttaggcacctcgac

SEQ ID NO: 9459 - DNA, 22 bp, synthetic construct
  misc_feature 1..22: note = Synthetic construct
  source 1..22: mol_type = other DNA
tgccactttaggcacctcgact

SEQ ID NO: 9460 - DNA, 22 bp, synthetic construct
  misc_feature 1..22: note = Synthetic construct
  source 1..22: mol_type = other DNA
gccactttaggcacctcgactt

SEQ ID NO: 9461 - DNA, 22 bp, synthetic construct
  misc_feature 1..22: note = Synthetic construct
  source 1..22: mol_type = other DNA
ccactttaggcacctcgacttt

SEQ ID NO: 9462 - DNA, 22 bp, synthetic construct
  misc_feature 1..22: note = Synthetic construct
  source 1..22: mol_type = other DNA
cactttaggcacctcgactttg

SEQ ID NO: 9463 - DNA, 22 bp, synthetic construct
  misc_feature 1..22: note = Synthetic construct
  source 1..22: mol_type = other DNA
actttaggcacctcgactttga

SEQ ID NO: 9464 - DNA, 22 bp, synthetic construct
  misc_feature 1..22: note = Synthetic construct
  source 1..22: mol_type = other DNA
ctttaggcacctcgactttgat

SEQ ID NO: 9465 - DNA, 22 bp, synthetic construct
  misc_feature 1..22: note = Synthetic construct
  source 1..22: mol_type = other DNA
tttaggcacctcgactttgatg

SEQ ID NO: 9466 - DNA, 22 bp, synthetic construct
  misc_feature 1..22: note = Synthetic construct
  source 1..22: mol_type = other DNA
ttaggcacctcgactttgatgg

SEQ ID NO: 9467 - DNA, 22 bp, synthetic construct
  misc_feature 1..22: note = Synthetic construct
  source 1..22: mol_type = other DNA
taggcacctcgactttgatggt

SEQ ID NO: 9468 - DNA, 22 bp, synthetic construct
  misc_feature 1..22: note = Synthetic construct
  source 1..22: mol_type = other DNA
aggcacctcgactttgatggtg

SEQ ID NO: 9469 - DNA, 22 bp, synthetic construct
  misc_feature 1..22: note = Synthetic construct
  source 1..22: mol_type = other DNA
ggcacctcgactttgatggtgt

SEQ ID NO: 9470 - DNA, 22 bp, synthetic construct
  misc_feature 1..22: note = Synthetic construct
  source 1..22: mol_type = other DNA
gcacctcgactttgatggtgta

SEQ ID NO: 9471 - DNA, 22 bp, synthetic construct
  misc_feature 1..22: note = Synthetic construct
  source 1..22: mol_type = other DNA
cacctcgactttgatggtgtat

SEQ ID NO: 9472 - DNA, 22 bp, synthetic construct
  misc_feature 1..22: note = Synthetic construct
  source 1..22: mol_type = other DNA
acctcgactttgatggtgtatt

SEQ ID NO: 9473 - DNA, 22 bp, synthetic construct
  misc_feature 1..22: note = Synthetic construct
  source 1..22: mol_type = other DNA
cctcgactttgatggtgtattt

SEQ ID NO: 9474 - DNA, 22 bp, synthetic construct
  misc_feature 1..22: note = Synthetic construct
  source 1..22: mol_type = other DNA
ctcgactttgatggtgtatttg

SEQ ID NO: 9475 - DNA, 22 bp, synthetic construct
  misc_feature 1..22: note = Synthetic construct
  source 1..22: mol_type = other DNA
tcgactttgatggtgtatttgc

SEQ ID NO: 9476 - DNA, 22 bp, synthetic construct
  misc_feature 1..22: note = Synthetic construct
  source 1..22: mol_type = other DNA
cgactttgatggtgtatttgcg

SEQ ID NO: 9477 - DNA, 22 bp, synthetic construct
  misc_feature 1..22: note = Synthetic construct
  source 1..22: mol_type = other DNA
gactttgatggtgtatttgcga

SEQ ID NO: 9478 - DNA, 22 bp, synthetic construct
  misc_feature 1..22: note = Synthetic construct
  source 1..22: mol_type = other DNA
actttgatggtgtatttgcgat

SEQ ID NO: 9479 - DNA, 22 bp, synthetic construct
  misc_feature 1..22: note = Synthetic construct
  source 1..22: mol_type = other DNA
ctttgatggtgtatttgcgatt

SEQ ID NO: 9480 - DNA, 22 bp, synthetic construct
  misc_feature 1..22: note = Synthetic construct
  source 1..22: mol_type = other DNA
tttgatggtgtatttgcgattc

SEQ ID NO: 9481 - DNA, 22 bp, synthetic construct
  misc_feature 1..22: note = Synthetic construct
  source 1..22: mol_type = other DNA
ttgatggtgtatttgcgattct

SEQ ID NO: 9482 - DNA, 22 bp, synthetic construct
  misc_feature 1..22: note = Synthetic construct
  source 1..22: mol_type = other DNA
tgatggtgtatttgcgattctg

SEQ ID NO: 9483 - DNA, 22 bp, synthetic construct
  misc_feature 1..22: note = Synthetic construct
  source 1..22: mol_type = other DNA
gatggtgtatttgcgattctgc

SEQ ID NO: 9484 - DNA, 22 bp, synthetic construct
  misc_feature 1..22: note = Synthetic construct
  source 1..22: mol_type = other DNA
atggtgtatttgcgattctgcg

SEQ ID NO: 9485 - DNA, 22 bp, synthetic construct
  misc_feature 1..22: note = Synthetic construct
  source 1..22: mol_type = other DNA
tggtgtatttgcgattctgcgc

SEQ ID NO: 9486 - DNA, 22 bp, synthetic construct
  misc_feature 1..22: note = Synthetic construct
  source 1..22: mol_type = other DNA
ggtgtatttgcgattctgcgca

SEQ ID NO: 9487 - DNA, 22 bp, synthetic construct
  misc_feature 1..22: note = Synthetic construct
  source 1..22: mol_type = other DNA
gtgtatttgcgattctgcgcag

SEQ ID NO: 9488 - DNA, 22 bp, synthetic construct
  misc_feature 1..22: note = Synthetic construct
  source 1..22: mol_type = other DNA
tgtatttgcgattctgcgcaga

SEQ ID NO: 9489 - DNA, 22 bp, synthetic construct
  misc_feature 1..22: note = Synthetic construct
  source 1..22: mol_type = other DNA
gtatttgcgattctgcgcagag

SEQ ID NO: 9490 - DNA, 22 bp, synthetic construct
  misc_feature 1..22: note = Synthetic construct
  source 1..22: mol_type = other DNA
tatttgcgattctgcgcagagc

SEQ ID NO: 9491 - DNA, 22 bp, synthetic construct
  misc_feature 1..22: note = Synthetic construct
  source 1..22: mol_type = other DNA
atttgcgattctgcgcagagct

SEQ ID NO: 9492 - DNA, 22 bp, synthetic construct
  misc_feature 1..22: note = Synthetic construct
  source 1..22: mol_type = other DNA
tttgcgattctgcgcagagctc

SEQ ID NO: 9493 - DNA, 22 bp, synthetic construct
  misc_feature 1..22: note = Synthetic construct
  source 1..22: mol_type = other DNA
ttgcgattctgcgcagagctct

SEQ ID NO: 9494 - DNA, 22 bp, synthetic construct
  misc_feature 1..22: note = Synthetic construct
  source 1..22: mol_type = other DNA
tgcgattctgcgcagagctctg

SEQ ID NO: 9495 - DNA, 22 bp, synthetic construct
  misc_feature 1..22: note = Synthetic construct
  source 1..22: mol_type = other DNA
gcgattctgcgcagagctctga

SEQ ID NO: 9496 - DNA, 22 bp, synthetic construct
  misc_feature 1..22: note = Synthetic construct
  source 1..22: mol_type = other DNA
cgattctgcgcagagctctgac

SEQ ID NO: 9497 - DNA, 22 bp, synthetic construct
  misc_feature 1..22: note = Synthetic construct
  source 1..22: mol_type = other DNA
gattctgcgcagagctctgacg

SEQ ID NO: 9498 - DNA, 22 bp, synthetic construct
  misc_feature 1..22: note = Synthetic construct
  source 1..22: mol_type = other DNA
attctgcgcagagctctgacga

SEQ ID NO: 9499 - DNA, 22 bp, synthetic construct
  misc_feature 1..22: note = Synthetic construct
  source 1..22: mol_type = other DNA
ttctgcgcagagctctgacgaa

SEQ ID NO: 9500 - DNA, 22 bp, synthetic construct
  misc_feature 1..22: note = Synthetic construct
  source 1..22: mol_type = other DNA
tctgcgcagagctctgacgaac

SEQ ID NO: 9501 - DNA, 22 bp, synthetic construct
  misc_feature 1..22: note = Synthetic construct
  source 1..22: mol_type = other DNA
ctgcgcagagctctgacgaacg

SEQ ID NO: 9502 - DNA, 22 bp, synthetic construct
  misc_feature 1..22: note = Synthetic construct
  source 1..22: mol_type = other DNA
tgcgcagagctctgacgaacgc

SEQ ID NO: 9503 - DNA, 22 bp, synthetic construct
  misc_feature 1..22: note = Synthetic construct
  source 1..22: mol_type = other DNA
gcgcagagctctgacgaacgct

SEQ ID NO: 9504 - DNA, 22 bp, synthetic construct
  misc_feature 1..22: note = Synthetic construct
  source 1..22: mol_type = other DNA
cgcagagctctgacgaacgcta

SEQ ID NO: 9505 - DNA, 22 bp, synthetic construct
  misc_feature 1..22: note = Synthetic construct
  source 1..22: mol_type = other DNA
gcagagctctgacgaacgctac

SEQ ID NO: 9506 - DNA, 22 bp, synthetic construct
  misc_feature 1..22: note = Synthetic construct
  source 1..22: mol_type = other DNA
cagagctctgacgaacgctaca

SEQ ID NO: 9507 - DNA, 22 bp, synthetic construct
  misc_feature 1..22: note = Synthetic construct
  source 1..22: mol_type = other DNA
agagctctgacgaacgctacag

SEQ ID NO: 9508 - DNA, 22 bp, synthetic construct
  misc_feature 1..22: note = Synthetic construct
  source 1..22: mol_type = other DNA
gagctctgacgaacgctacagg

SEQ ID NO: 9509 - DNA, 22 bp, synthetic construct
  misc_feature 1..22: note = Synthetic construct
  source 1..22: mol_type = other DNA
agctctgacgaacgctacaggt

SEQ ID NO: 9510 - DNA, 22 bp, synthetic construct
  misc_feature 1..22: note = Synthetic construct
  source 1..22: mol_type = other DNA
gctctgacgaacgctacaggtt

SEQ ID NO: 9511 - DNA, 22 bp, synthetic construct
  misc_feature 1..22: note = Synthetic construct
  source 1..22: mol_type = other DNA
ctctgacgaacgctacaggtta

SEQ ID NO: 9512 - DNA, 22 bp, synthetic construct
  misc_feature 1..22: note = Synthetic construct
  source 1..22: mol_type = other DNA
tctgacgaacgctacaggttac

SEQ ID NO: 9513 - DNA, 22 bp, synthetic construct
  misc_feature 1..22: note = Synthetic construct
  source 1..22: mol_type = other DNA
ctgacgaacgctacaggttact

SEQ ID NO: 9514 - DNA, 22 bp, synthetic construct
  misc_feature 1..22: note = Synthetic construct
  source 1..22: mol_type = other DNA
tgacgaacgctacaggttactt

SEQ ID NO: 9515 - DNA, 22 bp, synthetic construct
  misc_feature 1..22: note = Synthetic construct
  source 1..22: mol_type = other DNA
gacgaacgctacaggttacttt

SEQ ID NO: 9516 - DNA, 22 bp, synthetic construct
  misc_feature 1..22: note = Synthetic construct
  source 1..22: mol_type = other DNA
acgaacgctacaggttactttg

SEQ ID NO: 9517 - DNA, 22 bp, synthetic construct
  misc_feature 1..22: note = Synthetic construct
  source 1..22: mol_type = other DNA
cgaacgctacaggttactttgt

SEQ ID NO: 9518 - DNA, 22 bp, synthetic construct
  misc_feature 1..22: note = Synthetic construct
  source 1..22: mol_type = other DNA
gaacgctacaggttactttgta

SEQ ID NO: 9519 - DNA, 22 bp, synthetic construct
  misc_feature 1..22: note = Synthetic construct
  source 1..22: mol_type = other DNA
aacgctacaggttactttgtaa

SEQ ID NO: 9520 - DNA, 22 bp, synthetic construct
  misc_feature 1..22: note = Synthetic construct
  source 1..22: mol_type = other DNA
acgctacaggttactttgtaag

SEQ ID NO: 9521 - DNA, 22 bp, synthetic construct
  misc_feature 1..22: note = Synthetic construct
  source 1..22: mol_type = other DNA
cgctacaggttactttgtaagc

SEQ ID NO: 9522 - DNA, 22 bp, synthetic construct
  misc_feature 1..22: note = Synthetic construct
  source 1..22: mol_type = other DNA
gctacaggttactttgtaagcc

SEQ ID NO: 9523 - DNA, 22 bp, synthetic construct
  misc_feature 1..22: note = Synthetic construct
  source 1..22: mol_type = other DNA
ctacaggttactttgtaagcct

SEQ ID NO: 9524 - DNA, 22 bp, synthetic construct
  misc_feature 1..22: note = Synthetic construct
  source 1..22: mol_type = other DNA
tacaggttactttgtaagcctg

SEQ ID NO: 9525 - DNA, 22 bp, synthetic construct
  misc_feature 1..22: note = Synthetic construct
  source 1..22: mol_type = other DNA
acaggttactttgtaagcctgt

SEQ ID NO: 9526 - DNA, 22 bp, synthetic construct
  misc_feature 1..22: note = Synthetic construct
  source 1..22: mol_type = other DNA
caggttactttgtaagcctgtg

SEQ ID NO: 9527 - DNA, 22 bp, synthetic construct
  misc_feature 1..22: note = Synthetic construct
  source 1..22: mol_type = other DNA
aggttactttgtaagcctgtga

SEQ ID NO: 9528 - DNA, 22 bp, synthetic construct
  misc_feature 1..22: note = Synthetic construct
  source 1..22: mol_type = other DNA
ggttactttgtaagcctgtgaa

SEQ ID NO: 9529 - DNA, 22 bp, synthetic construct
  misc_feature 1..22: note = Synthetic construct
  source 1..22: mol_type = other DNA
gttactttgtaagcctgtgaac

SEQ ID NO: 9530 - DNA, 22 bp, synthetic construct
  misc_feature 1..22: note = Synthetic construct
  source 1..22: mol_type = other DNA
ttactttgtaagcctgtgaacg

SEQ ID NO: 9531 - DNA, 22 bp, synthetic construct
  misc_feature 1..22: note = Synthetic construct
  source 1..22: mol_type = other DNA
tactttgtaagcctgtgaacgc

SEQ ID NO: 9532 - DNA, 22 bp, synthetic construct
  misc_feature 1..22: note = Synthetic construct
  source 1..22: mol_type = other DNA
actttgtaagcctgtgaacgcg

SEQ ID NO: 9533 - DNA, 22 bp, synthetic construct
  misc_feature 1..22: note = Synthetic construct
  source 1..22: mol_type = other DNA
ctttgtaagcctgtgaacgcga

SEQ ID NO: 9534 - DNA, 22 bp, synthetic construct
  misc_feature 1..22: note = Synthetic construct
  source 1..22: mol_type = other DNA
tttgtaagcctgtgaacgcgag

SEQ ID NO: 9535 - DNA, 22 bp, synthetic construct
  misc_feature 1..22: note = Synthetic construct
  source 1..22: mol_type = other DNA
ttgtaagcctgtgaacgcgagt

SEQ ID NO: 9536 - DNA, 22 bp, synthetic construct
  misc_feature 1..22: note = Synthetic construct
  source 1..22: mol_type = other DNA
tgtaagcctgtgaacgcgagtt

SEQ ID NO: 9537 - DNA, 22 bp, synthetic construct
  misc_feature 1..22: note = Synthetic construct
  source 1..22: mol_type = other DNA
gtaagcctgtgaacgcgagtta

SEQ ID NO: 9538 - DNA, 22 bp, synthetic construct
  misc_feature 1..22: note = Synthetic construct
  source 1..22: mol_type = other DNA
taagcctgtgaacgcgagttag

SEQ ID NO: 9539 - DNA, 22 bp, synthetic construct
  misc_feature 1..22: note = Synthetic construct
  source 1..22: mol_type = other DNA
aagcctgtgaacgcgagttaga

SEQ ID NO: 9540 - DNA, 22 bp, synthetic construct
  misc_feature 1..22: note = Synthetic construct
  source 1..22: mol_type = other DNA
agcctgtgaacgcgagttagag

SEQ ID NO: 9541 - DNA, 22 bp, synthetic construct
  misc_feature 1..22: note = Synthetic construct
  source 1..22: mol_type = other DNA
gcctgtgaacgcgagttagagc

SEQ ID NO: 9542 - DNA, 22 bp, synthetic construct
  misc_feature 1..22: note = Synthetic construct
  source 1..22: mol_type = other DNA
cctgtgaacgcgagttagagct

SEQ ID NO: 9543 - DNA, 22 bp, synthetic construct
  misc_feature 1..22: note = Synthetic construct
  source 1..22: mol_type = other DNA
ctgtgaacgcgagttagagctg

SEQ ID NO: 9544 - DNA, 22 bp, synthetic construct
  misc_feature 1..22: note = Synthetic construct
  source 1..22: mol_type = other DNA
tgtgaacgcgagttagagctga

SEQ ID NO: 9545 - DNA, 22 bp, synthetic construct
  misc_feature 1..22: note = Synthetic construct
  source 1..22: mol_type = other DNA
gtgaacgcgagttagagctgat

SEQ ID NO: 9546 - DNA, 22 bp, synthetic construct
  misc_feature 1..22: note = Synthetic construct
  source 1..22: mol_type = other DNA
tgaacgcgagttagagctgatc

SEQ ID NO: 9547 - DNA, 22 bp, synthetic construct
  misc_feature 1..22: note = Synthetic construct
  source 1..22: mol_type = other DNA
gaacgcgagttagagctgatcc

SEQ ID NO: 9548 - DNA, 22 bp, synthetic construct
  misc_feature 1..22: note = Synthetic construct
  source 1..22: mol_type = other DNA
aacgcgagttagagctgatcca

SEQ ID NO: 9549 - DNA, 22 bp, synthetic construct
  misc_feature 1..22: note = Synthetic construct
  source 1..22: mol_type = other DNA
acgcgagttagagctgatccat

SEQ ID NO: 9550 - DNA, 22 bp, synthetic construct
  misc_feature 1..22: note = Synthetic construct
  source 1..22: mol_type = other DNA
cgcgagttagagctgatccatt

SEQ ID NO: 9551 - DNA, 22 bp, synthetic construct
  misc_feature 1..22: note = Synthetic construct
  source 1..22: mol_type = other DNA
gcgagttagagctgatccattc

SEQ ID NO: 9552 - DNA, 22 bp, synthetic construct
  misc_feature 1..22: note = Synthetic construct
  source 1..22: mol_type = other DNA
cgagttagagctgatccattca

SEQ ID NO: 9553 - DNA, 22 bp, synthetic construct
  misc_feature 1..22: note = Synthetic construct
  source 1..22: mol_type = other DNA
gagttagagctgatccattcag

SEQ ID NO: 9554 - DNA, 22 bp, synthetic construct
  misc_feature 1..22: note = Synthetic construct
  source 1..22: mol_type = other DNA
agttagagctgatccattcagc

SEQ ID NO: 9555 - DNA, 22 bp, synthetic construct
  misc_feature 1..22: note = Synthetic construct
  source 1..22: mol_type = other DNA
gttagagctgatccattcagcg

SEQ ID NO: 9556 - DNA, 22 bp, synthetic construct
  misc_feature 1..22: note = Synthetic construct
  source 1..22: mol_type = other DNA
ttagagctgatccattcagcga

SEQ ID NO: 9557 - DNA, 22 bp, synthetic construct
  misc_feature 1..22: note = Synthetic construct
  source 1..22: mol_type = other DNA
tagagctgatccattcagcgac

SEQ ID NO: 9558 - DNA, 22 bp, synthetic construct
  misc_feature 1..22: note = Synthetic construct
  source 1..22: mol_type = other DNA
agagctgatccattcagcgacc

SEQ ID NO: 9559 - DNA, 22 bp, synthetic construct
  misc_feature 1..22: note = Synthetic construct
  source 1..22: mol_type = other DNA
gagctgatccattcagcgaccc

SEQ ID NO: 9560 - DNA, 22 bp, synthetic construct
  misc_feature 1..22: note = Synthetic construct
  source 1..22: mol_type = other DNA
agctgatccattcagcgacccc

SEQ ID NO: 9561 - DNA, 22 bp, synthetic construct
  misc_feature 1..22: note = Synthetic construct
  source 1..22: mol_type = other DNA
gctgatccattcagcgaccccg

SEQ ID NO: 9562 - DNA, 22 bp, synthetic construct
  misc_feature 1..22: note = Synthetic construct
  source 1..22: mol_type = other DNA
ctgatccattcagcgaccccgt

SEQ ID NO: 9563 - DNA, 22 bp, synthetic construct
  misc_feature 1..22: note = Synthetic construct
  source 1..22: mol_type = other DNA
tgatccattcagcgaccccgtt

SEQ ID NO: 9564 - DNA, 22 bp, synthetic construct
  misc_feature 1..22: note = Synthetic construct
  source 1..22: mol_type = other DNA
gatccattcagcgaccccgtta

SEQ ID NO: 9565 - DNA, 22 bp, synthetic construct
  misc_feature 1..22: note = Synthetic construct
  source 1..22: mol_type = other DNA
atccattcagcgaccccgttag

SEQ ID NO: 9566 - DNA, 22 bp, synthetic construct
  misc_feature 1..22: note = Synthetic construct
  source 1..22: mol_type = other DNA
tccattcagcgaccccgttagc

SEQ ID NO: 9567 - DNA, 22 bp, synthetic construct
  misc_feature 1..22: note = Synthetic construct
  source 1..22: mol_type = other DNA
ccattcagcgaccccgttagcg

SEQ ID NO: 9568 - DNA, 22 bp, synthetic construct
  misc_feature 1..22: note = Synthetic construct
  source 1..22: mol_type = other DNA
cattcagcgaccccgttagcga

SEQ ID NO: 9569 - DNA, 22 bp, synthetic construct
  misc_feature 1..22: note = Synthetic construct
  source 1..22: mol_type = other DNA
attcagcgaccccgttagcgaa

SEQ ID NO: 9570 - DNA, 22 bp, synthetic construct
  misc_feature 1..22: note = Synthetic construct
  source 1..22: mol_type = other DNA
ttcagcgaccccgttagcgaag

SEQ ID NO: 9571 - DNA, 22 bp, synthetic construct
  misc_feature 1..22: note = Synthetic construct
  source 1..22: mol_type = other DNA
tcagcgaccccgttagcgaagt

SEQ ID NO: 9572 - DNA, 22 bp, synthetic construct
  misc_feature 1..22: note = Synthetic construct
  source 1..22: mol_type = other DNA
cagcgaccccgttagcgaagtt

SEQ ID NO: 9573 - DNA, 22 bp, synthetic construct
  misc_feature 1..22: note = Synthetic construct
  source 1..22: mol_type = other DNA
agcgaccccgttagcgaagttg

SEQ ID NO: 9574 - DNA, 22 bp, synthetic construct
  misc_feature 1..22: note = Synthetic construct
  source 1..22: mol_type = other DNA
gcgaccccgttagcgaagttgc

SEQ ID NO: 9575 - DNA, 22 bp, synthetic construct
  misc_feature 1..22: note = Synthetic construct
  source 1..22: mol_type = other DNA
cgaccccgttagcgaagttgct

SEQ ID NO: 9576 - DNA, 22 bp, synthetic construct
  misc_feature 1..22: note = Synthetic construct
  source 1..22: mol_type = other DNA
gaccccgttagcgaagttgctt

SEQ ID NO: 9577 - DNA, 22 bp, synthetic construct
  misc_feature 1..22: note = Synthetic construct
  source 1..22: mol_type = other DNA
accccgttagcgaagttgcttg

SEQ ID NO: 9578 - DNA, 22 bp, synthetic construct
  misc_feature 1..22: note = Synthetic construct
  source 1..22: mol_type = other DNA
ccccgttagcgaagttgcttgg

SEQ ID NO: 9579 - DNA, 22 bp, synthetic construct
  misc_feature 1..22: note = Synthetic construct
  source 1..22: mol_type = other DNA
cccgttagcgaagttgcttggg

SEQ ID NO: 9580 - DNA, 22 bp, synthetic construct
  misc_feature 1..22: note = Synthetic construct
  source 1..22: mol_type = other DNA
ccgttagcgaagttgcttgggg

SEQ ID NO: 9581 - DNA, 22 bp, synthetic construct
  misc_feature 1..22: note = Synthetic construct
  source 1..22: mol_type = other DNA
cgttagcgaagttgcttggggc

SEQ ID NO: 9582 - DNA, 22 bp, synthetic construct
  misc_feature 1..22: note = Synthetic construct
  source 1..22: mol_type = other DNA
gttagcgaagttgcttggggcg

SEQ ID NO: 9583 - DNA, 22 bp, synthetic construct
  misc_feature 1..22: note = Synthetic construct
  source 1..22: mol_type = other DNA
ttagcgaagttgcttggggcga

SEQ ID NO: 9584 - DNA, 22 bp, synthetic construct
  misc_feature 1..22: note = Synthetic construct
  source 1..22: mol_type = other DNA
tagcgaagttgcttggggcgac

SEQ ID NO: 9585 - DNA, 22 bp, synthetic construct
  misc_feature 1..22: note = Synthetic construct
  source 1..22: mol_type = other DNA
agcgaagttgcttggggcgaca

SEQ ID NO: 9586 - DNA, 22 bp, synthetic construct
  misc_feature 1..22: note = Synthetic construct
  source 1..22: mol_type = other DNA
gcgaagttgcttggggcgacag

SEQ ID NO: 9587 - DNA, 22 bp, synthetic construct
  misc_feature 1..22: note = Synthetic construct
  source 1..22: mol_type = other DNA
cgaagttgcttggggcgacagt

SEQ ID NO: 9588 - DNA, 22 bp, synthetic construct
  misc_feature 1..22: note = Synthetic construct
  source 1..22: mol_type = other DNA
gaagttgcttggggcgacagtc

SEQ ID NO: 9589 - DNA, 22 bp, synthetic construct
  misc_feature 1..22: note = Synthetic construct
  source 1..22: mol_type = other DNA
aagttgcttggggcgacagtca

SEQ ID NO: 9590 - DNA, 22 bp, synthetic construct
  misc_feature 1..22: note = Synthetic construct
  source 1..22: mol_type = other DNA
agttgcttggggcgacagtcac

SEQ ID NO: 9591 - DNA, 22 bp, synthetic construct
  misc_feature 1..22: note = Synthetic construct
  source 1..22: mol_type = other DNA
gttgcttggggcgacagtcacg

SEQ ID NO: 9592 - DNA, 22 bp, synthetic construct
  misc_feature 1..22: note = Synthetic construct
  source 1..22: mol_type = other DNA
ttgcttggggcgacagtcacgt

SEQ ID NO: 9593 - DNA, 22 bp, synthetic construct
  misc_feature 1..22: note = Synthetic construct
  source 1..22: mol_type = other DNA
tgcttggggcgacagtcacgtc

SEQ ID NO: 9594 - DNA, 22 bp, synthetic construct
  misc_feature 1..22: note = Synthetic construct
  source 1..22: mol_type = other DNA
gcttggggcgacagtcacgtcg

SEQ ID NO: 9595 - DNA, 22 bp, synthetic construct
  misc_feature 1..22: note = Synthetic construct
  source 1..22: mol_type = other DNA
cttggggcgacagtcacgtcgc

SEQ ID NO: 9596 - DNA, 22 bp, synthetic construct
  misc_feature 1..22: note = Synthetic construct
  source 1..22: mol_type = other DNA
ttggggcgacagtcacgtcgcc

SEQ ID NO: 9597 - DNA, 22 bp, synthetic construct
  misc_feature 1..22: note = Synthetic construct
  source 1..22: mol_type = other DNA
tggggcgacagtcacgtcgcca

SEQ ID NO: 9598 - DNA, 22 bp, synthetic construct
  misc_feature 1..22: note = Synthetic construct
  source 1..22: mol_type = other DNA
ggggcgacagtcacgtcgccag

SEQ ID NO: 9599 - DNA, 22 bp, synthetic construct
  misc_feature 1..22: note = Synthetic construct
  source 1..22: mol_type = other DNA
gggcgacagtcacgtcgccagt

SEQ ID NO: 9600 - DNA, 22 bp, synthetic construct
  misc_feature 1..22: note = Synthetic construct
  source 1..22: mol_type = other DNA
ggcgacagtcacgtcgccagtt

SEQ ID NO: 9601 - DNA, 22 bp, synthetic construct
  misc_feature 1..22: note = Synthetic construct
  source 1..22: mol_type = other DNA
gcgacagtcacgtcgccagttc

SEQ ID NO: 9602 - DNA, 22 bp, synthetic construct
  misc_feature 1..22: note = Synthetic construct
  source 1..22: mol_type = other DNA
cgacagtcacgtcgccagttcc

SEQ ID NO: 9603 - DNA, 22 bp, synthetic construct
  misc_feature 1..22: note = Synthetic construct
  source 1..22: mol_type = other DNA
gacagtcacgtcgccagttccg

SEQ ID NO: 9604 - DNA, 22 bp, synthetic construct
  misc_feature 1..22: note = Synthetic construct
  source 1..22: mol_type = other DNA
acagtcacgtcgccagttccgc

SEQ ID NO: 9605 - DNA, 22 bp, synthetic construct
  misc_feature 1..22: note = Synthetic construct
  source 1..22: mol_type = other DNA
cagtcacgtcgccagttccgcc

SEQ ID NO: 9606 - DNA, 22 bp, synthetic construct
  misc_feature 1..22: note = Synthetic construct
  source 1..22: mol_type = other DNA
agtcacgtcgccagttccgcca

SEQ ID NO: 9607 - DNA, 22 bp, synthetic construct
  misc_feature 1..22: note = Synthetic construct
  source 1..22: mol_type = other DNA
gtcacgtcgccagttccgccat

SEQ ID NO: 9608 - DNA, 22 bp, synthetic construct
  misc_feature 1..22: note = Synthetic construct
  source 1..22: mol_type = other DNA
tcacgtcgccagttccgccatt

SEQ ID NO: 9609 - DNA, 22 bp, synthetic construct
  misc_feature 1..22: note = Synthetic construct
  source 1..22: mol_type = other DNA
cacgtcgccagttccgccattg

SEQ ID NO: 9610 - DNA, 22 bp, synthetic construct
  misc_feature 1..22: note = Synthetic construct
  source 1..22: mol_type = other DNA
acgtcgccagttccgccattgt

SEQ ID NO: 9611 - DNA, 22 bp, synthetic construct
  misc_feature 1..22: note = Synthetic construct
  source 1..22: mol_type = other DNA
cgtcgccagttccgccattgtc

SEQ ID NO: 9612 - DNA, 22 bp, synthetic construct
  misc_feature 1..22: note = Synthetic construct
  source 1..22: mol_type = other DNA
gtcgccagttccgccattgtcg

SEQ ID NO: 9613 - DNA, 22 bp, synthetic construct
  misc_feature 1..22: note = Synthetic construct
  source 1..22: mol_type = other DNA
tcgccagttccgccattgtcga

SEQ ID NO: 9614 - DNA, 22 bp, synthetic construct
  misc_feature 1..22: note = Synthetic construct
  source 1..22: mol_type = other DNA
cgccagttccgccattgtcgac

SEQ ID NO: 9615 - DNA, 22 bp, synthetic construct
  misc_feature 1..22: note = Synthetic construct
  source 1..22: mol_type = other DNA
gccagttccgccattgtcgacg

SEQ ID NO: 9616 - DNA, 22 bp, synthetic construct
  misc_feature 1..22: note = Synthetic construct
  source 1..22: mol_type = other DNA
ccagttccgccattgtcgacga

SEQ ID NO: 9617 - DNA, 22 bp, synthetic construct
  misc_feature 1..22: note = Synthetic construct
  source 1..22: mol_type = other DNA
cagttccgccattgtcgacgag

SEQ ID NO: 9618 - DNA, 22 bp, synthetic construct
  misc_feature 1..22: note = Synthetic construct
  source 1..22: mol_type = other DNA
agttccgccattgtcgacgaga

SEQ ID NO: 9619 - DNA, 22 bp, synthetic construct
  misc_feature 1..22: note = Synthetic construct
  source 1..22: mol_type = other DNA
gttccgccattgtcgacgagaa

SEQ ID NO: 9620 - DNA, 22 bp, synthetic construct
  misc_feature 1..22: note = Synthetic construct
  source 1..22: mol_type = other DNA
ttccgccattgtcgacgagaac

SEQ ID NO: 9621 - DNA, 22 bp, synthetic construct
  misc_feature 1..22: note = Synthetic construct
  source 1..22: mol_type = other DNA
tccgccattgtcgacgagaacg

SEQ ID NO: 9622 - DNA, 22 bp, synthetic construct
  misc_feature 1..22: note = Synthetic construct
  source 1..22: mol_type = other DNA
ccgccattgtcgacgagaacga

SEQ ID NO: 9623 - DNA, 22 bp, synthetic construct
  misc_feature 1..22: note = Synthetic construct
  source 1..22: mol_type = other DNA
cgccattgtcgacgagaacgaa

SEQ ID NO: 9624 - DNA, 22 bp, synthetic construct
  misc_feature 1..22: note = Synthetic construct
  source 1..22: mol_type = other DNA
gccattgtcgacgagaacgaac

SEQ ID NO: 9625 - DNA, 22 bp, synthetic construct
  misc_feature 1..22: note = Synthetic construct
  source 1..22: mol_type = other DNA
ccattgtcgacgagaacgaact

SEQ ID NO: 9626 - DNA, 22 bp, synthetic construct
  misc_feature 1..22: note = Synthetic construct
  source 1..22: mol_type = other DNA
cattgtcgacgagaacgaactg

SEQ ID NO: 9627 - DNA, 22 bp, synthetic construct
  misc_feature 1..22: note = Synthetic construct
  source 1..22: mol_type = other DNA
attgtcgacgagaacgaactga

SEQ ID NO: 9628 - DNA, 22 bp, synthetic construct
  misc_feature 1..22: note = Synthetic construct
  source 1..22: mol_type = other DNA
ttgtcgacgagaacgaactgag

SEQ ID NO: 9629 - DNA, 22 bp, synthetic construct
  misc_feature 1..22: note = Synthetic construct
  source 1..22: mol_type = other DNA
tgtcgacgagaacgaactgagt

SEQ ID NO: 9630 - DNA, 22 bp, synthetic construct
  misc_feature 1..22: note = Synthetic construct
  source 1..22: mol_type = other DNA
gtcgacgagaacgaactgagta

SEQ ID NO: 9631 - DNA, 22 bp, synthetic construct
  misc_feature 1..22: note = Synthetic construct
  source 1..22: mol_type = other DNA
tcgacgagaacgaactgagtaa

SEQ ID NO: 9632 - DNA, 22 bp, synthetic construct
  misc_feature 1..22: note = Synthetic construct
  source 1..22: mol_type = other DNA
cgacgagaacgaactgagtaaa

SEQ ID NO: 9633 - DNA, 22 bp, synthetic construct
  misc_feature 1..22: note = Synthetic construct
  source 1..22: mol_type = other DNA
gacgagaacgaactgagtaaag

SEQ ID NO: 9634 - DNA, 22 bp, synthetic construct
  misc_feature 1..22: note = Synthetic construct
  source 1..22: mol_type = other DNA
acgagaacgaactgagtaaagt

SEQ ID NO: 9635 - DNA, 22 bp, synthetic construct
  misc_feature 1..22: note = Synthetic construct
  source 1..22: mol_type = other DNA
cgagaacgaactgagtaaagtt

SEQ ID NO: 9636 - DNA, 22 bp, synthetic construct
  misc_feature 1..22: note = Synthetic construct
  source 1..22: mol_type = other DNA
gagaacgaactgagtaaagtta

SEQ ID NO: 9637 - DNA, 22 bp, synthetic construct
  misc_feature 1..22: note = Synthetic construct
  source 1..22: mol_type = other DNA
agaacgaactgagtaaagttag

SEQ ID NO: 9638 - DNA, 22 bp, synthetic construct
  misc_feature 1..22: note = Synthetic construct
  source 1..22: mol_type = other DNA
gaacgaactgagtaaagttaga

SEQ ID NO: 9639 - DNA, 22 bp, synthetic construct
  misc_feature 1..22: note = Synthetic construct
  source 1..22: mol_type = other DNA
aacgaactgagtaaagttagaa

SEQ ID NO: 9640 - DNA, 22 bp, synthetic construct
  misc_feature 1..22: note = Synthetic construct
  source 1..22: mol_type = other DNA
acgaactgagtaaagttagaag

SEQ ID NO: 9641 - DNA, 22 bp, synthetic construct
  misc_feature 1..22: note = Synthetic construct
  source 1..22: mol_type = other DNA
cgaactgagtaaagttagaagc

SEQ ID NO: 9642 - DNA, 22 bp, synthetic construct
  misc_feature 1..22: note = Synthetic construct
  source 1..22: mol_type = other DNA
gaactgagtaaagttagaagcc

SEQ ID NO: 9643 - DNA, 22 bp, synthetic construct
  misc_feature 1..22: note = Synthetic construct
  source 1..22: mol_type = other DNA
aactgagtaaagttagaagcca

SEQ ID NO: 9644 - DNA, 22 bp, synthetic construct
  misc_feature 1..22: note = Synthetic construct
  source 1..22: mol_type = other DNA
actgagtaaagttagaagccat

SEQ ID NO: 9645 - DNA, 22 bp, synthetic construct
  misc_feature 1..22: note = Synthetic construct
  source 1..22: mol_type = other DNA
ctgagtaaagttagaagccatg

SEQ ID NO: 9646 - DNA, 22 bp, synthetic construct
  misc_feature 1..22: note = Synthetic construct
  source 1..22: mol_type = other DNA
tgagtaaagttagaagccatgc

SEQ ID NO: 9647 - DNA, 22 bp, synthetic construct
  misc_feature 1..22: note = Synthetic construct
  source 1..22: mol_type = other DNA
gagtaaagttagaagccatgct

SEQ ID NO: 9648 - DNA, 22 bp, synthetic construct
  misc_feature 1..22: note = Synthetic construct
  source 1..22: mol_type = other DNA
agtaaagttagaagccatgctt

SEQ ID NO: 9649 - DNA, 22 bp, synthetic construct
  misc_feature 1..22: note = Synthetic construct
  source 1..22: mol_type = other DNA
gtaaagttagaagccatgcttc

SEQ ID NO: 9650 - DNA, 22 bp, synthetic construct
  misc_feature 1..22: note = Synthetic construct
  source 1..22: mol_type = other DNA
taaagttagaagccatgcttca

SEQ ID NO: 9651 - DNA, 22 bp, synthetic construct
  misc_feature 1..22: note = Synthetic construct
  source 1..22: mol_type = other DNA
aaagttagaagccatgcttcaa

SEQ ID NO: 9652 - DNA, 22 bp, synthetic construct
  misc_feature 1..22: note = Synthetic construct
  source 1..22: mol_type = other DNA
aagttagaagccatgcttcaaa

SEQ ID NO: 9653 - DNA, 22 bp, synthetic construct
  misc_feature 1..22: note = Synthetic construct
  source 1..22: mol_type = other DNA
agttagaagccatgcttcaaac

SEQ ID NO: 9654 - DNA, 22 bp, synthetic construct
  misc_feature 1..22: note = Synthetic construct
  source 1..22: mol_type = other DNA
gttagaagccatgcttcaaact

SEQ ID NO: 9655 - DNA, 22 bp, synthetic construct
  misc_feature 1..22: note = Synthetic construct
  source 1..22: mol_type = other DNA
ttagaagccatgcttcaaactc

SEQ ID NO: 9656 - DNA, 22 bp, synthetic construct
  misc_feature 1..22: note = Synthetic construct
  source 1..22: mol_type = other DNA
tagaagccatgcttcaaactcc

SEQ ID NO: 9657 - DNA, 22 bp, synthetic construct
  misc_feature 1..22: note = Synthetic construct
  source 1..22: mol_type = other DNA
agaagccatgcttcaaactccg

SEQ ID NO: 9658 - DNA, 22 bp, synthetic construct
  misc_feature 1..22: note = Synthetic construct
  source 1..22: mol_type = other DNA
gaagccatgcttcaaactccgg

SEQ ID NO: 9659 - DNA, 22 bp, synthetic construct
  misc_feature 1..22: note = Synthetic construct
  source 1..22: mol_type = other DNA
aagccatgcttcaaactccggt

SEQ ID NO: 9660 - DNA, 22 bp, synthetic construct
  misc_feature 1..22: note = Synthetic construct
  source 1..22: mol_type = other DNA
agccatgcttcaaactccggtt

SEQ ID NO: 9661 - DNA, 22 bp, synthetic construct
  misc_feature 1..22: note = Synthetic construct
  source 1..22: mol_type = other DNA
gccatgcttcaaactccggttg

SEQ ID NO: 9662 - DNA, 22 bp, synthetic construct
  misc_feature 1..22: note = Synthetic construct
  source 1..22: mol_type = other DNA
ccatgcttcaaactccggttga

SEQ ID NO: 9663 - DNA, 22 bp, synthetic construct
  misc_feature 1..22: note = Synthetic construct
  source 1..22: mol_type = other DNA
catgcttcaaactccggttgag

SEQ ID NO: 9664 - DNA, 22 bp, synthetic construct
  misc_feature 1..22: note = Synthetic construct
  source 1..22: mol_type = other DNA
atgcttcaaactccggttgagg

SEQ ID NO: 9665 - DNA, 22 bp, synthetic construct
  misc_feature 1..22: note = Synthetic construct
  source 1..22: mol_type = other DNA
tgcttcaaactccggttgaggg

SEQ ID NO: 9666 - DNA, 22 bp, synthetic construct
  misc_feature 1..22: note = Synthetic construct
  source 1..22: mol_type = other DNA
gcttcaaactccggttgagggc

SEQ ID NO: 9667 - DNA, 22 bp, synthetic construct
  misc_feature 1..22: note = Synthetic construct
  source 1..22: mol_type = other DNA
cttcaaactccggttgagggct

SEQ ID NO: 9668 - DNA, 22 bp, synthetic construct
  misc_feature 1..22: note = Synthetic construct
  source 1..22: mol_type = other DNA
ttcaaactccggttgagggctc

SEQ ID NO: 9669 - DNA, 22 bp, synthetic construct
  misc_feature 1..22: note = Synthetic construct
  source 1..22: mol_type = other DNA
tcaaactccggttgagggctct

SEQ ID NO: 9670 - DNA, 22 bp, synthetic construct
  misc_feature 1..22: note = Synthetic construct
  source 1..22: mol_type = other DNA
caaactccggttgagggctcta

SEQ ID NO: 9671 - DNA, 22 bp, synthetic construct
  misc_feature 1..22: note = Synthetic construct
  source 1..22: mol_type = other DNA
aaactccggttgagggctctat

SEQ ID NO: 9672 - DNA, 22 bp, synthetic construct
  misc_feature 1..22: note = Synthetic construct
  source 1..22: mol_type = other DNA
aactccggttgagggctctatc

SEQ ID NO: 9673 - DNA, 22 bp, synthetic construct
  misc_feature 1..22: note = Synthetic construct
  source 1..22: mol_type = other DNA
actccggttgagggctctatct

SEQ ID NO: 9674 - DNA, 22 bp, synthetic construct
  misc_feature 1..22: note = Synthetic construct
  source 1..22: mol_type = other DNA
ctccggttgagggctctatcta

SEQ ID NO: 9675 - DNA, 22 bp, synthetic construct
  misc_feature 1..22: note = Synthetic construct
  source 1..22: mol_type = other DNA
tccggttgagggctctatctag

SEQ ID NO: 9676 - DNA, 22 bp, synthetic construct
  misc_feature 1..22: note = Synthetic construct
  source 1..22: mol_type = other DNA
ccggttgagggctctatctaga

SEQ ID NO: 9677 - DNA, 22 bp, synthetic construct
  misc_feature 1..22: note = Synthetic construct
  source 1..22: mol_type = other DNA
cggttgagggctctatctagag

SEQ ID NO: 9678 - DNA, 22 bp, synthetic construct
  misc_feature 1..22: note = Synthetic construct
  source 1..22: mol_type = other DNA
ggttgagggctctatctagaga

SEQ ID NO: 9679 - DNA, 22 bp, synthetic construct
  misc_feature 1..22: note = Synthetic construct
  source 1..22: mol_type = other DNA
gttgagggctctatctagagag

SEQ ID NO: 9680 - DNA, 22 bp, synthetic construct
  misc_feature 1..22: note = Synthetic construct
  source 1..22: mol_type = other DNA
ttgagggctctatctagagagc

SEQ ID NO: 9681 - DNA, 22 bp, synthetic construct
  misc_feature 1..22: note = Synthetic construct
  source 1..22: mol_type = other DNA
tgagggctctatctagagagcc

SEQ ID NO: 9682 - DNA, 22 bp, synthetic construct
  misc_feature 1..22: note = Synthetic construct
  source 1..22: mol_type = other DNA
gagggctctatctagagagccg

SEQ ID NO: 9683 - DNA, 22 bp, synthetic construct
  misc_feature 1..22: note = Synthetic construct
  source 1..22: mol_type = other DNA
agggctctatctagagagccgt

SEQ ID NO: 9684 - DNA, 22 bp, synthetic construct
  misc_feature 1..22: note = Synthetic construct
  source 1..22: mol_type = other DNA
gggctctatctagagagccgtt

SEQ ID NO: 9685 - DNA, 22 bp, synthetic construct
  misc_feature 1..22: note = Synthetic construct
  source 1..22: mol_type = other DNA
ggctctatctagagagccgttg

SEQ ID NO: 9686 - DNA, 22 bp, synthetic construct
  misc_feature 1..22: note = Synthetic construct
  source 1..22: mol_type = other DNA
gctctatctagagagccgttgc

SEQ ID NO: 9687 - DNA, 22 bp, synthetic construct
  misc_feature 1..22: note = Synthetic construct
  source 1..22: mol_type = other DNA
ctctatctagagagccgttgcc

SEQ ID NO: 9688 - DNA, 22 bp, synthetic construct
  misc_feature 1..22: note = Synthetic construct
  source 1..22: mol_type = other DNA
tctatctagagagccgttgcct

SEQ ID NO: 9689 - DNA, 22 bp, synthetic construct
  misc_feature 1..22: note = Synthetic construct
  source 1..22: mol_type = other DNA
ctatctagagagccgttgcctg

SEQ ID NO: 9690 - DNA, 22 bp, synthetic construct
  misc_feature 1..22: note = Synthetic construct
  source 1..22: mol_type = other DNA
tatctagagagccgttgcctga

SEQ ID NO: 9691 - DNA, 22 bp, synthetic construct
  misc_feature 1..22: note = Synthetic construct
  source 1..22: mol_type = other DNA
atctagagagccgttgcctgat

SEQ ID NO: 9692 - DNA, 22 bp, synthetic construct
  misc_feature 1..22: note = Synthetic construct
  source 1..22: mol_type = other DNA
tctagagagccgttgcctgatt

SEQ ID NO: 9693 - DNA, 22 bp, synthetic construct
  misc_feature 1..22: note = Synthetic construct
  source 1..22: mol_type = other DNA
ctagagagccgttgcctgatta

SEQ ID NO: 9694 - DNA, 22 bp, synthetic construct
  misc_feature 1..22: note = Synthetic construct
  source 1..22: mol_type = other DNA
tagagagccgttgcctgattaa

SEQ ID NO: 9695 - DNA, 22 bp, synthetic construct
  misc_feature 1..22: note = Synthetic construct
  source 1..22: mol_type = other DNA
agagagccgttgcctgattaat

SEQ ID NO: 9696 - DNA, 22 bp, synthetic construct
  misc_feature 1..22: note = Synthetic construct
  source 1..22: mol_type = other DNA
gagagccgttgcctgattaatg

SEQ ID NO: 9697 - DNA, 22 bp, synthetic construct
  misc_feature 1..22: note = Synthetic construct
  source 1..22: mol_type = other DNA
agagccgttgcctgattaatgc

SEQ ID NO: 9698 - DNA, 22 bp, synthetic construct
  misc_feature 1..22: note = Synthetic construct
  source 1..22: mol_type = other DNA
gagccgttgcctgattaatgct

SEQ ID NO: 9699 - DNA, 22 bp, synthetic construct
  misc_feature 1..22: note = Synthetic construct
  source 1..22: mol_type = other DNA
agccgttgcctgattaatgcta

SEQ ID NO: 9700 - DNA, 22 bp, synthetic construct
  misc_feature 1..22: note = Synthetic construct
  source 1..22: mol_type = other DNA
gccgttgcctgattaatgctaa

SEQ ID NO: 9701 - DNA, 22 bp, synthetic construct
  misc_feature 1..22: note = Synthetic construct
  source 1..22: mol_type = other DNA
ccgttgcctgattaatgctaac

SEQ ID NO: 9702 - DNA, 22 bp, synthetic construct
  misc_feature 1..22: note = Synthetic construct
  source 1..22: mol_type = other DNA
cgttgcctgattaatgctaacg

SEQ ID NO: 9703 - DNA, 22 bp, synthetic construct
  misc_feature 1..22: note = Synthetic construct
  source 1..22: mol_type = other DNA
gttgcctgattaatgctaacgc

SEQ ID NO: 9704 - DNA, 22 bp, synthetic construct
  misc_feature 1..22: note = Synthetic construct
  source 1..22: mol_type = other DNA
ttgcctgattaatgctaacgca

SEQ ID NO: 9705 - DNA, 22 bp, synthetic construct
  misc_feature 1..22: note = Synthetic construct
  source 1..22: mol_type = other DNA
tgcctgattaatgctaacgcat

SEQ ID NO: 9706 - DNA, 22 bp, synthetic construct
  misc_feature 1..22: note = Synthetic construct
  source 1..22: mol_type = other DNA
gcctgattaatgctaacgcatc

SEQ ID NO: 9707 - DNA, 22 bp, synthetic construct
  misc_feature 1..22: note = Synthetic construct
  source 1..22: mol_type = other DNA
cctgattaatgctaacgcatct

SEQ ID NO: 9708 - DNA, 22 bp, synthetic construct
  misc_feature 1..22: note = Synthetic construct
  source 1..22: mol_type = other DNA
ctgattaatgctaacgcatcta

SEQ ID NO: 9709 - DNA, 22 bp, synthetic construct
  misc_feature 1..22: note = Synthetic construct
  source 1..22: mol_type = other DNA
tgattaatgctaacgcatctaa

SEQ ID NO: 9710 - DNA, 22 bp, synthetic construct
  misc_feature 1..22: note = Synthetic construct
  source 1..22: mol_type = other DNA
gattaatgctaacgcatctaag

SEQ ID NO: 9711 - DNA, 22 bp, synthetic construct
  misc_feature 1..22: note = Synthetic construct
  source 1..22: mol_type = other DNA
attaatgctaacgcatctaagg

SEQ ID NO: 9712 - DNA, 22 bp, synthetic construct
  misc_feature 1..22: note = Synthetic construct
  source 1..22: mol_type = other DNA
ttaatgctaacgcatctaaggt

SEQ ID NO: 9713 - DNA, 22 bp, synthetic construct
  misc_feature 1..22: note = Synthetic construct
  source 1..22: mol_type = other DNA
taatgctaacgcatctaaggta

SEQ ID NO: 9714 - DNA, 22 bp, synthetic construct
  misc_feature 1..22: note = Synthetic construct
  source 1..22: mol_type = other DNA
aatgctaacgcatctaaggtat

SEQ ID NO: 9715 - DNA, 22 bp, synthetic construct
  misc_feature 1..22: note = Synthetic construct
  source 1..22: mol_type = other DNA
atgctaacgcatctaaggtatg

SEQ ID NO: 9716 - DNA, 22 bp, synthetic construct
  misc_feature 1..22: note = Synthetic construct
  source 1..22: mol_type = other DNA
tgctaacgcatctaaggtatgg

SEQ ID NO: 9717 - DNA, 22 bp, synthetic construct
  misc_feature 1..22: note = Synthetic construct
  source 1..22: mol_type = other DNA
gctaacgcatctaaggtatgga

SEQ ID NO: 9718 - DNA, 22 bp, synthetic construct
  misc_feature 1..22: note = Synthetic construct
  source 1..22: mol_type = other DNA
ctaacgcatctaaggtatggac

SEQ ID NO: 9719 - DNA, 22 bp, synthetic construct
  misc_feature 1..22: note = Synthetic construct
  source 1..22: mol_type = other DNA
taacgcatctaaggtatggacc

SEQ ID NO: 9720 - DNA, 22 bp, synthetic construct
  misc_feature 1..22: note = Synthetic construct
  source 1..22: mol_type = other DNA
aacgcatctaaggtatggacca

SEQ ID NO: 9721 - DNA, 22 bp, synthetic construct
  misc_feature 1..22: note = Synthetic construct
  source 1..22: mol_type = other DNA
acgcatctaaggtatggaccat

SEQ ID NO: 9722 - DNA, 22 bp, synthetic construct
  misc_feature 1..22: note = Synthetic construct
  source 1..22: mol_type = other DNA
cgcatctaaggtatggaccatc

SEQ ID NO: 9723 - DNA, 22 bp, synthetic construct
  misc_feature 1..22: note = Synthetic construct
  source 1..22: mol_type = other DNA
gcatctaaggtatggaccatcg

SEQ ID NO: 9724 - DNA, 22 bp, synthetic construct
  misc_feature 1..22: note = Synthetic construct
  source 1..22: mol_type = other DNA
catctaaggtatggaccatcga

SEQ ID NO: 9725 - DNA, 22 bp, synthetic construct
  misc_feature 1..22: note = Synthetic construct
  source 1..22: mol_type = other DNA
atctaaggtatggaccatcgag

SEQ ID NO: 9726 - DNA, 22 bp, synthetic construct
  misc_feature 1..22: note = Synthetic construct
  source 1..22: mol_type = other DNA
tctaaggtatggaccatcgaga

SEQ ID NO: 9727 - DNA, 22 bp, synthetic construct
  misc_feature 1..22: note = Synthetic construct
  source 1..22: mol_type = other DNA
ctaaggtatggaccatcgagaa

SEQ ID NO: 9728 - DNA, 22 bp, synthetic construct
  misc_feature 1..22: note = Synthetic construct
  source 1..22: mol_type = other DNA
taaggtatggaccatcgagaaa

SEQ ID NO: 9729 - DNA, 22 bp, synthetic construct
  misc_feature 1..22: note = Synthetic construct
  source 1..22: mol_type = other DNA
aaggtatggaccatcgagaaag

SEQ ID NO: 9730 - DNA, 22 bp, synthetic construct
  misc_feature 1..22: note = Synthetic construct
  source 1..22: mol_type = other DNA
aggtatggaccatcgagaaagg

SEQ ID NO: 9731 - DNA, 22 bp, synthetic construct
  misc_feature 1..22: note = Synthetic construct
  source 1..22: mol_type = other DNA
ggtatggaccatcgagaaagga

SEQ ID NO: 9732 - DNA, 22 bp, synthetic construct
  misc_feature 1..22: note = Synthetic construct
  source 1..22: mol_type = other DNA
gtatggaccatcgagaaaggag

SEQ ID NO: 9733 - DNA, 22 bp, synthetic construct
  misc_feature 1..22: note = Synthetic construct
  source 1..22: mol_type = other DNA
tatggaccatcgagaaaggaga

SEQ ID NO: 9734 - DNA, 22 bp, synthetic construct
  misc_feature 1..22: note = Synthetic construct
  source 1..22: mol_type = other DNA
atggaccatcgagaaaggagac

SEQ ID NO: 9735 - DNA, 22 bp, synthetic construct
  misc_feature 1..22: note = Synthetic construct
  source 1..22: mol_type = other DNA
tggaccatcgagaaaggagact

SEQ ID NO: 9736 - DNA, 22 bp, synthetic construct
  misc_feature 1..22: note = Synthetic construct
  source 1..22: mol_type = other DNA
ggaccatcgagaaaggagactt

SEQ ID NO: 9737 - DNA, 22 bp, synthetic construct
  misc_feature 1..22: note = Synthetic construct
  source 1..22: mol_type = other DNA
gaccatcgagaaaggagacttt

SEQ ID NO: 9738 - DNA, 22 bp, synthetic construct
  misc_feature 1..22: note = Synthetic construct
  source 1..22: mol_type = other DNA
accatcgagaaaggagacttta

SEQ ID NO: 9739 - DNA, 22 bp, synthetic construct
  misc_feature 1..22: note = Synthetic construct
  source 1..22: mol_type = other DNA
ccatcgagaaaggagactttac

SEQ ID NO: 9740 - DNA, 22 bp, synthetic construct
  misc_feature 1..22: note = Synthetic construct
  source 1..22: mol_type = other DNA
catcgagaaaggagactttacg

SEQ ID NO: 9741 - DNA, 22 bp, synthetic construct
  misc_feature 1..22: note = Synthetic construct
  source 1..22: mol_type = other DNA
atcgagaaaggagactttacgt

SEQ ID NO: 9742 - DNA, 22 bp, synthetic construct
  misc_feature 1..22: note = Synthetic construct
  source 1..22: mol_type = other DNA
tcgagaaaggagactttacgta

SEQ ID NO: 9743 - DNA, 22 bp, synthetic construct
  misc_feature 1..22: note = Synthetic construct
  source 1..22: mol_type = other DNA
cgagaaaggagactttacgtac

SEQ ID NO: 9744 - DNA, 22 bp, synthetic construct
  misc_feature 1..22: note = Synthetic construct
  source 1..22: mol_type = other DNA
gagaaaggagactttacgtacg

SEQ ID NO: 9745 - DNA, 22 bp, synthetic construct
  misc_feature 1..22: note = Synthetic construct
  source 1..22: mol_type = other DNA
agaaaggagactttacgtacgc

SEQ ID NO: 9746 - DNA, 22 bp, synthetic construct
  misc_feature 1..22: note = Synthetic construct
  source 1..22: mol_type = other DNA
gaaaggagactttacgtacgcg

SEQ ID NO: 9747 - DNA, 22 bp, synthetic construct
  misc_feature 1..22: note = Synthetic construct
  source 1..22: mol_type = other DNA
aaaggagactttacgtacgcgc

SEQ ID NO: 9748 - DNA, 22 bp, synthetic construct
  misc_feature 1..22: note = Synthetic construct
  source 1..22: mol_type = other DNA
aaggagactttacgtacgcgcc

SEQ ID NO: 9749 - DNA, 22 bp, synthetic construct
  misc_feature 1..22: note = Synthetic construct
  source 1..22: mol_type = other DNA
aggagactttacgtacgcgcca

SEQ ID NO: 9750 - DNA, 22 bp, synthetic construct
  misc_feature 1..22: note = Synthetic construct
  source 1..22: mol_type = other DNA
ggagactttacgtacgcgccag

SEQ ID NO: 9751 - DNA, 22 bp, synthetic construct
  misc_feature 1..22: note = Synthetic construct
  source 1..22: mol_type = other DNA
gagactttacgtacgcgccagt

SEQ ID NO: 9752 - DNA, 22 bp, synthetic construct
  misc_feature 1..22: note = Synthetic construct
  source 1..22: mol_type = other DNA
agactttacgtacgcgccagtt

SEQ ID NO: 9753 - DNA, 22 bp, synthetic construct
  misc_feature 1..22: note = Synthetic construct
  source 1..22: mol_type = other DNA
gactttacgtacgcgccagttg

SEQ ID NO: 9754 - DNA, 22 bp, synthetic construct
  misc_feature 1..22: note = Synthetic construct
  source 1..22: mol_type = other DNA
actttacgtacgcgccagttgt

SEQ ID NO: 9755 - DNA, 22 bp, synthetic construct
  misc_feature 1..22: note = Synthetic construct
  source 1..22: mol_type = other DNA
ctttacgtacgcgccagttgtt

SEQ ID NO: 9756 - DNA, 22 bp, synthetic construct
  misc_feature 1..22: note = Synthetic construct
  source 1..22: mol_type = other DNA
tttacgtacgcgccagttgttg

SEQ ID NO: 9757 - DNA, 22 bp, synthetic construct
  misc_feature 1..22: note = Synthetic construct
  source 1..22: mol_type = other DNA
ttacgtacgcgccagttgttgg

SEQ ID NO: 9758 - DNA, 22 bp, synthetic construct
  misc_feature 1..22: note = Synthetic construct
  source 1..22: mol_type = other DNA
tacgtacgcgccagttgttggc

SEQ ID NO: 9759 - DNA, 22 bp, synthetic construct
  misc_feature 1..22: note = Synthetic construct
  source 1..22: mol_type = other DNA
acgtacgcgccagttgttggcc

SEQ ID NO: 9760 - DNA, 22 bp, synthetic construct
  misc_feature 1..22: note = Synthetic construct
  source 1..22: mol_type = other DNA
cgtacgcgccagttgttggcca

SEQ ID NO: 9761 - DNA, 22 bp, synthetic construct
  misc_feature 1..22: note = Synthetic construct
  source 1..22: mol_type = other DNA
gtacgcgccagttgttggccat

SEQ ID NO: 9762 - DNA, 22 bp, synthetic construct
  misc_feature 1..22: note = Synthetic construct
  source 1..22: mol_type = other DNA
tacgcgccagttgttggccata

SEQ ID NO: 9763 - DNA, 22 bp, synthetic construct
  misc_feature 1..22: note = Synthetic construct
  source 1..22: mol_type = other DNA
acgcgccagttgttggccatac

SEQ ID NO: 9764 - DNA, 22 bp, synthetic construct
  misc_feature 1..22: note = Synthetic construct
  source 1..22: mol_type = other DNA
cgcgccagttgttggccatacg

SEQ ID NO: 9765 - DNA, 22 bp, synthetic construct
  misc_feature 1..22: note = Synthetic construct
  source 1..22: mol_type = other DNA
gcgccagttgttggccatacgg

SEQ ID NO: 9766 - DNA, 22 bp, synthetic construct
  misc_feature 1..22: note = Synthetic construct
  source 1..22: mol_type = other DNA
cgccagttgttggccatacgga

SEQ ID NO: 9767 - DNA, 22 bp, synthetic construct
  misc_feature 1..22: note = Synthetic construct
  source 1..22: mol_type = other DNA
gccagttgttggccatacggat

SEQ ID NO: 9768 - DNA, 22 bp, synthetic construct
  misc_feature 1..22: note = Synthetic construct
  source 1..22: mol_type = other DNA
ccagttgttggccatacggatt

SEQ ID NO: 9769 - DNA, 22 bp, synthetic construct
  misc_feature 1..22: note = Synthetic construct
  source 1..22: mol_type = other DNA
cagttgttggccatacggattg

SEQ ID NO: 9770 - DNA, 22 bp, synthetic construct
  misc_feature 1..22: note = Synthetic construct
  source 1..22: mol_type = other DNA
agttgttggccatacggattgt

SEQ ID NO: 9771 - DNA, 22 bp, synthetic construct
  misc_feature 1..22: note = Synthetic construct
  source 1..22: mol_type = other DNA
gttgttggccatacggattgta

SEQ ID NO: 9772 - DNA, 22 bp, synthetic construct
  misc_feature 1..22: note = Synthetic construct
  source 1..22: mol_type = other DNA
ttgttggccatacggattgtac

SEQ ID NO: 9773 - DNA, 22 bp, synthetic construct
  misc_feature 1..22: note = Synthetic construct
  source 1..22: mol_type = other DNA
tgttggccatacggattgtacc

SEQ ID NO: 9774 - DNA, 22 bp, synthetic construct
  misc_feature 1..22: note = Synthetic construct
  source 1..22: mol_type = other DNA
gttggccatacggattgtaccc

SEQ ID NO: 9775 - DNA, 22 bp, synthetic construct
  misc_feature 1..22: note = Synthetic construct
  source 1..22: mol_type = other DNA
ttggccatacggattgtacccc

SEQ ID NO: 9776 - DNA, 22 bp, synthetic construct
  misc_feature 1..22: note = Synthetic construct
  source 1..22: mol_type = other DNA
tggccatacggattgtacccct

SEQ ID NO: 9777 - DNA, 22 bp, synthetic construct
  misc_feature 1..22: note = Synthetic construct
  source 1..22: mol_type = other DNA
ggccatacggattgtacccctc

SEQ ID NO: 9778 - DNA, 22 bp, synthetic construct
  misc_feature 1..22: note = Synthetic construct
  source 1..22: mol_type = other DNA
gccatacggattgtacccctcg

SEQ ID NO: 9779 - DNA, 22 bp, synthetic construct
  misc_feature 1..22: note = Synthetic construct
  source 1..22: mol_type = other DNA
ccatacggattgtacccctcga

SEQ ID NO: 9780 - DNA, 22 bp, synthetic construct
  misc_feature 1..22: note = Synthetic construct
  source 1..22: mol_type = other DNA
catacggattgtacccctcgat

SEQ ID NO: 9781 - DNA, 22 bp, synthetic construct
  misc_feature 1..22: note = Synthetic construct
  source 1..22: mol_type = other DNA
atacggattgtacccctcgatg

SEQ ID NO: 9782 - DNA, 22 bp, synthetic construct
  misc_feature 1..22: note = Synthetic construct
  source 1..22: mol_type = other DNA
tacggattgtacccctcgatgc

SEQ ID NO: 9783 - DNA, 22 bp, synthetic construct
  misc_feature 1..22: note = Synthetic construct
  source 1..22: mol_type = other DNA
acggattgtacccctcgatgca

SEQ ID NO: 9784 - DNA, 22 bp, synthetic construct
  misc_feature 1..22: note = Synthetic construct
  source 1..22: mol_type = other DNA
cggattgtacccctcgatgcat

SEQ ID NO: 9785 - DNA, 22 bp, synthetic construct
  misc_feature 1..22: note = Synthetic construct
  source 1..22: mol_type = other DNA
ggattgtacccctcgatgcatg

SEQ ID NO: 9786 - DNA, 22 bp, synthetic construct
  misc_feature 1..22: note = Synthetic construct
  source 1..22: mol_type = other DNA
gattgtacccctcgatgcatgg

SEQ ID NO: 9787 - DNA, 22 bp, synthetic construct
  misc_feature 1..22: note = Synthetic construct
  source 1..22: mol_type = other DNA
attgtacccctcgatgcatggc

SEQ ID NO: 9788 - DNA, 22 bp, synthetic construct
  misc_feature 1..22: note = Synthetic construct
  source 1..22: mol_type = other DNA
ttgtacccctcgatgcatggct

SEQ ID NO: 9789 - DNA, 22 bp, synthetic construct
  misc_feature 1..22: note = Synthetic construct
  source 1..22: mol_type = other DNA
tgtacccctcgatgcatggctg

SEQ ID NO: 9790 - DNA, 22 bp, synthetic construct
  misc_feature 1..22: note = Synthetic construct
  source 1..22: mol_type = other DNA
gtacccctcgatgcatggctga

SEQ ID NO: 9791 - DNA, 22 bp, synthetic construct
  misc_feature 1..22: note = Synthetic construct
  source 1..22: mol_type = other DNA
tacccctcgatgcatggctgag

SEQ ID NO: 9792 - DNA, 22 bp, synthetic construct
  misc_feature 1..22: note = Synthetic construct
  source 1..22: mol_type = other DNA
acccctcgatgcatggctgaga

SEQ ID NO: 9793 - DNA, 22 bp, synthetic construct
  misc_feature 1..22: note = Synthetic construct
  source 1..22: mol_type = other DNA
cccctcgatgcatggctgagat

SEQ ID NO: 9794 - DNA, 22 bp, synthetic construct
  misc_feature 1..22: note = Synthetic construct
  source 1..22: mol_type = other DNA
ccctcgatgcatggctgagatt

SEQ ID NO: 9795 - DNA, 22 bp, synthetic construct
  misc_feature 1..22: note = Synthetic construct
  source 1..22: mol_type = other DNA
cctcgatgcatggctgagattt

SEQ ID NO: 9796 - DNA, 22 bp, synthetic construct
  misc_feature 1..22: note = Synthetic construct
  source 1..22: mol_type = other DNA
ctcgatgcatggctgagatttg

SEQ ID NO: 9797 - DNA, 22 bp, synthetic construct
  misc_feature 1..22: note = Synthetic construct
  source 1..22: mol_type = other DNA
tcgatgcatggctgagatttgg

SEQ ID NO: 9798 - DNA, 22 bp, synthetic construct
  misc_feature 1..22: note = Synthetic construct
  source 1..22: mol_type = other DNA
cgatgcatggctgagatttggg

SEQ ID NO: 9799 - DNA, 22 bp, synthetic construct
  misc_feature 1..22: note = Synthetic construct
  source 1..22: mol_type = other DNA
gatgcatggctgagatttgggc

SEQ ID NO: 9800 - DNA, 22 bp, synthetic construct
  misc_feature 1..22: note = Synthetic construct
  source 1..22: mol_type = other DNA
atgcatggctgagatttgggcc

SEQ ID NO: 9801 - DNA, 22 bp, synthetic construct
  misc_feature 1..22: note = Synthetic construct
  source 1..22: mol_type = other DNA
tgcatggctgagatttgggcct

SEQ ID NO: 9802 - DNA, 22 bp, synthetic construct
  misc_feature 1..22: note = Synthetic construct
  source 1..22: mol_type = other DNA
gcatggctgagatttgggcctt

SEQ ID NO: 9803 - DNA, 22 bp, synthetic construct
  misc_feature 1..22: note = Synthetic construct
  source 1..22: mol_type = other DNA
catggctgagatttgggcctta

SEQ ID NO: 9804 - DNA, 22 bp, synthetic construct
  misc_feature 1..22: note = Synthetic construct
  source 1..22: mol_type = other DNA
atggctgagatttgggccttag

SEQ ID NO: 9805 - DNA, 22 bp, synthetic construct
  misc_feature 1..22: note = Synthetic construct
  source 1..22: mol_type = other DNA
tggctgagatttgggccttagc

SEQ ID NO: 9806 - DNA, 22 bp, synthetic construct
  misc_feature 1..22: note = Synthetic construct
  source 1..22: mol_type = other DNA
ggctgagatttgggccttagca

SEQ ID NO: 9807 - DNA, 22 bp, synthetic construct
  misc_feature 1..22: note = Synthetic construct
  source 1..22: mol_type = other DNA
gctgagatttgggccttagcag

SEQ ID NO: 9808 - DNA, 22 bp, synthetic construct
  misc_feature 1..22: note = Synthetic construct
  source 1..22: mol_type = other DNA
ctgagatttgggccttagcagt

SEQ ID NO: 9809 - DNA, 22 bp, synthetic construct
  misc_feature 1..22: note = Synthetic construct
  source 1..22: mol_type = other DNA
tgagatttgggccttagcagtg

SEQ ID NO: 9810 - DNA, 22 bp, synthetic construct
  misc_feature 1..22: note = Synthetic construct
  source 1..22: mol_type = other DNA
gagatttgggccttagcagtgc

SEQ ID NO: 9811 - DNA, 22 bp, synthetic construct
  misc_feature 1..22: note = Synthetic construct
  source 1..22: mol_type = other DNA
agatttgggccttagcagtgcc

SEQ ID NO: 9812 - DNA, 22 bp, synthetic construct
  misc_feature 1..22: note = Synthetic construct
  source 1..22: mol_type = other DNA
gatttgggccttagcagtgccc

SEQ ID NO: 9813 - DNA, 22 bp, synthetic construct
  misc_feature 1..22: note = Synthetic construct
  source 1..22: mol_type = other DNA
atttgggccttagcagtgccct

SEQ ID NO: 9814 - DNA, 22 bp, synthetic construct
  misc_feature 1..22: note = Synthetic construct
  source 1..22: mol_type = other DNA
tttgggccttagcagtgccctg

SEQ ID NO: 9815 - DNA, 22 bp, synthetic construct
  misc_feature 1..22: note = Synthetic construct
  source 1..22: mol_type = other DNA
ttgggccttagcagtgccctgt

SEQ ID NO: 9816 - DNA, 22 bp, synthetic construct
  misc_feature 1..22: note = Syntheticconstruct
  source 1..22: mol_type = other DNA
tgggccttagcagtgccctgtc

SEQ ID NO: 9817 - DNA, 22 bp, synthetic construct
  misc_feature 1..22: note = Synthetic construct
  source 1..22: mol_type = other DNA
gggccttagcagtgccctgtct

SEQ ID NO: 9818 - DNA, 22 bp, synthetic construct
  misc_feature 1..22: note = Synthetic construct
  source 1..22: mol_type = other DNA
ggccttagcagtgccctgtctc

SEQ ID NO: 9819 - DNA, 22 bp, synthetic construct
  misc_feature 1..22: note = Synthetic construct
  source 1..22: mol_type = other DNA
gccttagcagtgccctgtctct

SEQ ID NO: 9820 - DNA, 22 bp, synthetic construct
  misc_feature 1..22: note = Synthetic construct
  source 1..22: mol_type = other DNA
ccttagcagtgccctgtctctc

SEQ ID NO: 9821 - DNA, 22 bp, synthetic construct
  misc_feature 1..22: note = Synthetic construct
  source 1..22: mol_type = other DNA
cttagcagtgccctgtctctcc

SEQ ID NO: 9822 - DNA, 22 bp, synthetic construct
  misc_feature 1..22: note = Synthetic construct
  source 1..22: mol_type = other DNA
ttagcagtgccctgtctctcca

SEQ ID NO: 9823 - DNA, 22 bp, synthetic construct
  misc_feature 1..22: note = Synthetic construct
  source 1..22: mol_type = other DNA
tagcagtgccctgtctctccac

SEQ ID NO: 9824 - DNA, 22 bp, synthetic construct
  misc_feature 1..22: note = Synthetic construct
  source 1..22: mol_type = other DNA
agcagtgccctgtctctccaca

SEQ ID NO: 9825 - DNA, 22 bp, synthetic construct
  misc_feature 1..22: note = Synthetic construct
  source 1..22: mol_type = other DNA
gcagtgccctgtctctccacag

SEQ ID NO: 9826 - DNA, 22 bp, synthetic construct
  misc_feature 1..22: note = Synthetic construct
  source 1..22: mol_type = other DNA
cagtgccctgtctctccacagt

SEQ ID NO: 9827 - DNA, 22 bp, synthetic construct
  misc_feature 1..22: note = Synthetic construct
  source 1..22: mol_type = other DNA
agtgccctgtctctccacagtc

SEQ ID NO: 9828 - DNA, 22 bp, synthetic construct
  misc_feature 1..22: note = Synthetic construct
  source 1..22: mol_type = other DNA
gtgccctgtctctccacagtcc

SEQ ID NO: 9829 - DNA, 22 bp, synthetic construct
  misc_feature 1..22: note = Synthetic construct
  source 1..22: mol_type = other DNA
tgccctgtctctccacagtcca

SEQ ID NO: 9830 - DNA, 22 bp, synthetic construct
  misc_feature 1..22: note = Synthetic construct
  source 1..22: mol_type = other DNA
gccctgtctctccacagtccac

SEQ ID NO: 9831 - DNA, 22 bp, synthetic construct
  misc_feature 1..22: note = Synthetic construct
  source 1..22: mol_type = other DNA
ccctgtctctccacagtccacc

SEQ ID NO: 9832 - DNA, 22 bp, synthetic construct
  misc_feature 1..22: note = Synthetic construct
  source 1..22: mol_type = other DNA
cctgtctctccacagtccaccc

SEQ ID NO: 9833 - DNA, 22 bp, synthetic construct
  misc_feature 1..22: note = Synthetic construct
  source 1..22: mol_type = other DNA
ctgtctctccacagtccacccg

SEQ ID NO: 9834 - DNA, 22 bp, synthetic construct
  misc_feature 1..22: note = Synthetic construct
  source 1..22: mol_type = other DNA
tgtctctccacagtccacccgt

SEQ ID NO: 9835 - DNA, 22 bp, synthetic construct
  misc_feature 1..22: note = Synthetic construct
  source 1..22: mol_type = other DNA
gtctctccacagtccacccgta

SEQ ID NO: 9836 - DNA, 22 bp, synthetic construct
  misc_feature 1..22: note = Synthetic construct
  source 1..22: mol_type = other DNA
tctctccacagtccacccgtag

SEQ ID NO: 9837 - DNA, 22 bp, synthetic construct
  misc_feature 1..22: note = Synthetic construct
  source 1..22: mol_type = other DNA
ctctccacagtccacccgtagg

SEQ ID NO: 9838 - DNA, 22 bp, synthetic construct
  misc_feature 1..22: note = Synthetic construct
  source 1..22: mol_type = other DNA
tctccacagtccacccgtaggg

SEQ ID NO: 9839 - DNA, 22 bp, synthetic construct
  misc_feature 1..22: note = Synthetic construct
  source 1..22: mol_type = other DNA
ctccacagtccacccgtaggga

SEQ ID NO: 9840 - DNA, 22 bp, synthetic construct
  misc_feature 1..22: note = Synthetic construct
  source 1..22: mol_type = other DNA
tccacagtccacccgtagggag

SEQ ID NO: 9841 - DNA, 22 bp, synthetic construct
  misc_feature 1..22: note = Synthetic construct
  source 1..22: mol_type = other DNA
ccacagtccacccgtagggagc

SEQ ID NO: 9842 - DNA, 22 bp, synthetic construct
  misc_feature 1..22: note = Synthetic construct
  source 1..22: mol_type = other DNA
cacagtccacccgtagggagcg

SEQ ID NO: 9843 - DNA, 22 bp, synthetic construct
  misc_feature 1..22: note = Synthetic construct
  source 1..22: mol_type = other DNA
acagtccacccgtagggagcgt

SEQ ID NO: 9844 - DNA, 22 bp, synthetic construct
  misc_feature 1..22: note = Synthetic construct
  source 1..22: mol_type = other DNA
cagtccacccgtagggagcgtc

SEQ ID NO: 9845 - DNA, 22 bp, synthetic construct
  misc_feature 1..22: note = Synthetic construct
  source 1..22: mol_type = other DNA
agtccacccgtagggagcgtca

SEQ ID NO: 9846 - DNA, 22 bp, synthetic construct
  misc_feature 1..22: note = Synthetic construct
  source 1..22: mol_type = other DNA
gtccacccgtagggagcgtcaa

SEQ ID NO: 9847 - DNA, 22 bp, synthetic construct
  misc_feature 1..22: note = Synthetic construct
  source 1..22: mol_type = other DNA
tccacccgtagggagcgtcaac

SEQ ID NO: 9848 - DNA, 22 bp, synthetic construct
  misc_feature 1..22: note = Synthetic construct
  source 1..22: mol_type = other DNA
ccacccgtagggagcgtcaacg

SEQ ID NO: 9849 - DNA, 22 bp, synthetic construct
  misc_feature 1..22: note = Synthetic construct
  source 1..22: mol_type = other DNA
cacccgtagggagcgtcaacgc

SEQ ID NO: 9850 - DNA, 22 bp, synthetic construct
  misc_feature 1..22: note = Synthetic construct
  source 1..22: mol_type = other DNA
acccgtagggagcgtcaacgct

SEQ ID NO: 9851 - DNA, 22 bp, synthetic construct
  misc_feature 1..22: note = Synthetic construct
  source 1..22: mol_type = other DNA
cccgtagggagcgtcaacgctt

SEQ ID NO: 9852 - DNA, 22 bp, synthetic construct
  misc_feature 1..22: note = Synthetic construct
  source 1..22: mol_type = other DNA
ccgtagggagcgtcaacgctta

SEQ ID NO: 9853 - DNA, 22 bp, synthetic construct
  misc_feature 1..22: note = Synthetic construct
  source 1..22: mol_type = other DNA
cgtagggagcgtcaacgcttat

SEQ ID NO: 9854 - DNA, 22 bp, synthetic construct
  misc_feature 1..22: note = Synthetic construct
  source 1..22: mol_type = other DNA
gtagggagcgtcaacgcttatg

SEQ ID NO: 9855 - DNA, 22 bp, synthetic construct
  misc_feature 1..22: note = Synthetic construct
  source 1..22: mol_type = other DNA
tagggagcgtcaacgcttatga

SEQ ID NO: 9856 - DNA, 22 bp, synthetic construct
  misc_feature 1..22: note = Synthetic construct
  source 1..22: mol_type = other DNA
agggagcgtcaacgcttatgat

SEQ ID NO: 9857 - DNA, 22 bp, synthetic construct
  misc_feature 1..22: note = Synthetic construct
  source 1..22: mol_type = other DNA
gggagcgtcaacgcttatgatg

SEQ ID NO: 9858 - DNA, 22 bp, synthetic construct
  misc_feature 1..22: note = Synthetic construct
  source 1..22: mol_type = other DNA
ggagcgtcaacgcttatgatgg

SEQ ID NO: 9859 - DNA, 22 bp, synthetic construct
  misc_feature 1..22: note = Synthetic construct
  source 1..22: mol_type = other DNA
gagcgtcaacgcttatgatgga

SEQ ID NO: 9860 - DNA, 22 bp, synthetic construct
  misc_feature 1..22: note = Synthetic construct
  source 1..22: mol_type = other DNA
agcgtcaacgcttatgatggac

SEQ ID NO: 9861 - DNA, 22 bp, synthetic construct
  misc_feature 1..22: note = Synthetic construct
  source 1..22: mol_type = other DNA
gcgtcaacgcttatgatggact

SEQ ID NO: 9862 - DNA, 22 bp, synthetic construct
  misc_feature 1..22: note = Synthetic construct
  source 1..22: mol_type = other DNA
cgtcaacgcttatgatggactc

SEQ ID NO: 9863 - DNA, 22 bp, synthetic construct
  misc_feature 1..22: note = Synthetic construct
  source 1..22: mol_type = other DNA
gtcaacgcttatgatggactca

SEQ ID NO: 9864 - DNA, 22 bp, synthetic construct
  misc_feature 1..22: note = Synthetic construct
  source 1..22: mol_type = other DNA
tcaacgcttatgatggactcac

SEQ ID NO: 9865 - DNA, 22 bp, synthetic construct
  misc_feature 1..22: note = Synthetic construct
  source 1..22: mol_type = other DNA
caacgcttatgatggactcacc

SEQ ID NO: 9866 - DNA, 22 bp, synthetic construct
  misc_feature 1..22: note = Synthetic construct
  source 1..22: mol_type = other DNA
aacgcttatgatggactcaccc

SEQ ID NO: 9867 - DNA, 22 bp, synthetic construct
  misc_feature 1..22: note = Synthetic construct
  source 1..22: mol_type = other DNA
acgcttatgatggactcacccg

SEQ ID NO: 9868 - DNA, 22 bp, synthetic construct
  misc_feature 1..22: note = Synthetic construct
  source 1..22: mol_type = other DNA
cgcttatgatggactcacccgt

SEQ ID NO: 9869 - DNA, 22 bp, synthetic construct
  misc_feature 1..22: note = Synthetic construct
  source 1..22: mol_type = other DNA
gcttatgatggactcacccgtt

SEQ ID NO: 9870 - DNA, 22 bp, synthetic construct
  misc_feature 1..22: note = Synthetic construct
  source 1..22: mol_type = other DNA
cttatgatggactcacccgtta

SEQ ID NO: 9871 - DNA, 22 bp, synthetic construct
  misc_feature 1..22: note = Synthetic construct
  source 1..22: mol_type = other DNA
ttatgatggactcacccgttat

SEQ ID NO: 9872 - DNA, 22 bp, synthetic construct
  misc_feature 1..22: note = Synthetic construct
  source 1..22: mol_type = other DNA
tatgatggactcacccgttatt

SEQ ID NO: 9873 - DNA, 22 bp, synthetic construct
  misc_feature 1..22: note = Synthetic construct
  source 1..22: mol_type = other DNA
atgatggactcacccgttatta

SEQ ID NO: 9874 - DNA, 22 bp, synthetic construct
  misc_feature 1..22: note = Synthetic construct
  source 1..22: mol_type = other DNA
tgatggactcacccgttattac

SEQ ID NO: 9875 - DNA, 22 bp, synthetic construct
  misc_feature 1..22: note = Synthetic construct
  source 1..22: mol_type = other DNA
gatggactcacccgttattacg

SEQ ID NO: 9876 - DNA, 22 bp, synthetic construct
  misc_feature 1..22: note = Synthetic construct
  source 1..22: mol_type = other DNA
atggactcacccgttattacgt

SEQ ID NO: 9877 - DNA, 22 bp, synthetic construct
  misc_feature 1..22: note = Synthetic construct
  source 1..22: mol_type = other DNA
tggactcacccgttattacgtc

SEQ ID NO: 9878 - DNA, 22 bp, synthetic construct
  misc_feature 1..22: note = Synthetic construct
  source 1..22: mol_type = other DNA
ggactcacccgttattacgtca

SEQ ID NO: 9879 - DNA, 22 bp, synthetic construct
  misc_feature 1..22: note = Synthetic construct
  source 1..22: mol_type = other DNA
gactcacccgttattacgtcag

SEQ ID NO: 9880 - DNA, 22 bp, synthetic construct
  misc_feature 1..22: note = Synthetic construct
  source 1..22: mol_type = other DNA
actcacccgttattacgtcagt

SEQ ID NO: 9881 - DNA, 22 bp, synthetic construct
  misc_feature 1..22: note = Synthetic construct
  source 1..22: mol_type = other DNA
ctcacccgttattacgtcagta

SEQ ID NO: 9882 - DNA, 22 bp, synthetic construct
  misc_feature 1..22: note = Synthetic construct
  source 1..22: mol_type = other DNA
tcacccgttattacgtcagtaa

SEQ ID NO: 9883 - DNA, 22 bp, synthetic construct
  misc_feature 1..22: note = Synthetic construct
  source 1..22: mol_type = other DNA
cacccgttattacgtcagtaac

SEQ ID NO: 9884 - DNA, 22 bp, synthetic construct
  misc_feature 1..22: note = Synthetic construct
  source 1..22: mol_type = other DNA
acccgttattacgtcagtaact

SEQ ID NO: 9885 - DNA, 22 bp, synthetic construct
  misc_feature 1..22: note = Synthetic construct
  source 1..22: mol_type = other DNA
cccgttattacgtcagtaactg

SEQ ID NO: 9886 - DNA, 22 bp, synthetic construct
  misc_feature 1..22: note = Synthetic construct
  source 1..22: mol_type = other DNA
ccgttattacgtcagtaactgt

SEQ ID NO: 9887 - DNA, 22 bp, synthetic construct
  misc_feature 1..22: note = Synthetic construct
  source 1..22: mol_type = other DNA
cgttattacgtcagtaactgtt

SEQ ID NO: 9888 - DNA, 22 bp, synthetic construct
  misc_feature 1..22: note = Synthetic construct
  source 1..22: mol_type = other DNA
gttattacgtcagtaactgttc

SEQ ID NO: 9889 - DNA, 22 bp, synthetic construct
  misc_feature 1..22: note = Synthetic construct
  source 1..22: mol_type = other DNA
ttattacgtcagtaactgttcc

SEQ ID NO: 9890 - DNA, 22 bp, synthetic construct
  misc_feature 1..22: note = Synthetic construct
  source 1..22: mol_type = other DNA
tattacgtcagtaactgttcct

SEQ ID NO: 9891 - DNA, 22 bp, synthetic construct
  misc_feature 1..22: note = Synthetic construct
  source 1..22: mol_type = other DNA
attacgtcagtaactgttcctg

SEQ ID NO: 9892 - DNA, 22 bp, synthetic construct
  misc_feature 1..22: note = Synthetic construct
  source 1..22: mol_type = other DNA
ttacgtcagtaactgttcctga

SEQ ID NO: 9893 - DNA, 22 bp, synthetic construct
  misc_feature 1..22: note = Synthetic construct
  source 1..22: mol_type = other DNA
tacgtcagtaactgttcctgac

SEQ ID NO: 9894 - DNA, 22 bp, synthetic construct
  misc_feature 1..22: note = Synthetic construct
  source 1..22: mol_type = other DNA
acgtcagtaactgttcctgaca

SEQ ID NO: 9895 - DNA, 22 bp, synthetic construct
  misc_feature 1..22: note = Synthetic construct
  source 1..22: mol_type = other DNA
cgtcagtaactgttcctgacat

SEQ ID NO: 9896 - DNA, 22 bp, synthetic construct
  misc_feature 1..22: note = Synthetic construct
  source 1..22: mol_type = other DNA
gtcagtaactgttcctgacatg

SEQ ID NO: 9897 - DNA, 22 bp, synthetic construct
  misc_feature 1..22: note = Synthetic construct
  source 1..22: mol_type = other DNA
tcagtaactgttcctgacatgt

SEQ ID NO: 9898 - DNA, 22 bp, synthetic construct
  misc_feature 1..22: note = Synthetic construct
  source 1..22: mol_type = other DNA
cagtaactgttcctgacatgta

SEQ ID NO: 9899 - DNA, 22 bp, synthetic construct
  misc_feature 1..22: note = Synthetic construct
  source 1..22: mol_type = other DNA
agtaactgttcctgacatgtag

SEQ ID NO: 9900 - DNA, 22 bp, synthetic construct
  misc_feature 1..22: note = Synthetic construct
  source 1..22: mol_type = other DNA
gtaactgttcctgacatgtagg

SEQ ID NO: 9901 - DNA, 22 bp, synthetic construct
  misc_feature 1..22: note = Synthetic construct
  source 1..22: mol_type = other DNA
taactgttcctgacatgtagga

SEQ ID NO: 9902 - DNA, 22 bp, synthetic construct
  misc_feature 1..22: note = Synthetic construct
  source 1..22: mol_type = other DNA
aactgttcctgacatgtaggag

SEQ ID NO: 9903 - DNA, 22 bp, synthetic construct
  misc_feature 1..22: note = Synthetic construct
  source 1..22: mol_type = other DNA
actgttcctgacatgtaggagc

SEQ ID NO: 9904 - DNA, 22 bp, synthetic construct
  misc_feature 1..22: note = Synthetic construct
  source 1..22: mol_type = other DNA
ctgttcctgacatgtaggagca

SEQ ID NO: 9905 - DNA, 22 bp, synthetic construct
  misc_feature 1..22: note = Synthetic construct
  source 1..22: mol_type = other DNA
tgttcctgacatgtaggagcat

SEQ ID NO: 9906 - DNA, 22 bp, synthetic construct
  misc_feature 1..22: note = Synthetic construct
  source 1..22: mol_type = other DNA
gttcctgacatgtaggagcatc

SEQ ID NO: 9907 - DNA, 22 bp, synthetic construct
  misc_feature 1..22: note = Synthetic construct
  source 1..22: mol_type = other DNA
ttcctgacatgtaggagcatcc

SEQ ID NO: 9908 - DNA, 22 bp, synthetic construct
  misc_feature 1..22: note = Synthetic construct
  source 1..22: mol_type = other DNA
tcctgacatgtaggagcatccc

SEQ ID NO: 9909 - DNA, 22 bp, synthetic construct
  misc_feature 1..22: note = Synthetic construct
  source 1..22: mol_type = other DNA
cctgacatgtaggagcatccca

SEQ ID NO: 9910 - DNA, 22 bp, synthetic construct
  misc_feature 1..22: note = Synthetic construct
  source 1..22: mol_type = other DNA
ctgacatgtaggagcatcccac

SEQ ID NO: 9911 - DNA, 22 bp, synthetic construct
  misc_feature 1..22: note = Synthetic construct
  source 1..22: mol_type = other DNA
tgacatgtaggagcatcccacg

SEQ ID NO: 9912 - DNA, 22 bp, synthetic construct
  misc_feature 1..22: note = Synthetic construct
  source 1..22: mol_type = other DNA
gacatgtaggagcatcccacgg

SEQ ID NO: 9913 - DNA, 22 bp, synthetic construct
  misc_feature 1..22: note = Synthetic construct
  source 1..22: mol_type = other DNA
acatgtaggagcatcccacggg

SEQ ID NO: 9914 - DNA, 22 bp, synthetic construct
  misc_feature 1..22: note = Synthetic construct
  source 1..22: mol_type = other DNA
catgtaggagcatcccacgggg

SEQ ID NO: 9915 - DNA, 22 bp, synthetic construct
  misc_feature 1..22: note = Synthetic construct
  source 1..22: mol_type = other DNA
atgtaggagcatcccacggggg

SEQ ID NO: 9916 - DNA, 22 bp, synthetic construct
  misc_feature 1..22: note = Synthetic construct
  source 1..22: mol_type = other DNA
tgtaggagcatcccacgggggc

SEQ ID NO: 9917 - DNA, 22 bp, synthetic construct
  misc_feature 1..22: note = Synthetic construct
  source 1..22: mol_type = other DNA
gtaggagcatcccacgggggcc

SEQ ID NO: 9918 - DNA, 22 bp, synthetic construct
  misc_feature 1..22: note = Synthetic construct
  source 1..22: mol_type = other DNA
taggagcatcccacgggggccg

SEQ ID NO: 9919 - DNA, 22 bp, synthetic construct
  misc_feature 1..22: note = Synthetic construct
  source 1..22: mol_type = other DNA
aggagcatcccacgggggccgt

SEQ ID NO: 9920 - DNA, 22 bp, synthetic construct
  misc_feature 1..22: note = Synthetic construct
  source 1..22: mol_type = other DNA
ggagcatcccacgggggccgta

SEQ ID NO: 9921 - DNA, 22 bp, synthetic construct
  misc_feature 1..22: note = Synthetic construct
  source 1..22: mol_type = other DNA
gagcatcccacgggggccgtaa

SEQ ID NO: 9922 - DNA, 22 bp, synthetic construct
  misc_feature 1..22: note = Synthetic construct
  source 1..22: mol_type = other DNA
agcatcccacgggggccgtaag

SEQ ID NO: 9923 - DNA, 22 bp, synthetic construct
  misc_feature 1..22: note = Synthetic construct
  source 1..22: mol_type = other DNA
gcatcccacgggggccgtaagg

SEQ ID NO: 9924 - DNA, 22 bp, synthetic construct
  misc_feature 1..22: note = Synthetic construct
  source 1..22: mol_type = other DNA
catcccacgggggccgtaaggc

SEQ ID NO: 9925 - DNA, 22 bp, synthetic construct
  misc_feature 1..22: note = Synthetic construct
  source 1..22: mol_type = other DNA
atcccacgggggccgtaaggcc

SEQ ID NO: 9926 - DNA, 22 bp, synthetic construct
  misc_feature 1..22: note = Synthetic construct
  source 1..22: mol_type = other DNA
tcccacgggggccgtaaggccc

SEQ ID NO: 9927 - DNA, 22 bp, synthetic construct
  misc_feature 1..22: note = Synthetic construct
  source 1..22: mol_type = other DNA
cccacgggggccgtaaggccct

SEQ ID NO: 9928 - DNA, 22 bp, synthetic construct
  misc_feature 1..22: note = Synthetic construct
  source 1..22: mol_type = other DNA
ccacgggggccgtaaggccctc

SEQ ID NO: 9929 - DNA, 22 bp, synthetic construct
  misc_feature 1..22: note = Synthetic construct
  source 1..22: mol_type = other DNA
cacgggggccgtaaggccctcg

SEQ ID NO: 9930 - DNA, 22 bp, synthetic construct
  misc_feature 1..22: note = Synthetic construct
  source 1..22: mol_type = other DNA
acgggggccgtaaggccctcga

SEQ ID NO: 9931 - DNA, 22 bp, synthetic construct
  misc_feature 1..22: note = Synthetic construct
  source 1..22: mol_type = other DNA
cgggggccgtaaggccctcgag

SEQ ID NO: 9932 - DNA, 22 bp, synthetic construct
  misc_feature 1..22: note = Synthetic construct
  source 1..22: mol_type = other DNA
gggggccgtaaggccctcgagc

SEQ ID NO: 9933 - DNA, 22 bp, synthetic construct
  misc_feature 1..22: note = Synthetic construct
  source 1..22: mol_type = other DNA
ggggccgtaaggccctcgagca

SEQ ID NO: 9934 - DNA, 22 bp, synthetic construct
  misc_feature 1..22: note = Synthetic construct
  source 1..22: mol_type = other DNA
gggccgtaaggccctcgagcat

SEQ ID NO: 9935 - DNA, 22 bp, synthetic construct
  misc_feature 1..22: note = Synthetic construct
  source 1..22: mol_type = other DNA
ggccgtaaggccctcgagcatg

SEQ ID NO: 9936 - DNA, 22 bp, synthetic construct
  misc_feature 1..22: note = Synthetic construct
  source 1..22: mol_type = other DNA
gccgtaaggccctcgagcatgt

SEQ ID NO: 9937 - DNA, 22 bp, synthetic construct
  misc_feature 1..22: note = Synthetic construct
  source 1..22: mol_type = other DNA
ccgtaaggccctcgagcatgtt

SEQ ID NO: 9938 - DNA, 22 bp, synthetic construct
  misc_feature 1..22: note = Synthetic construct
  source 1..22: mol_type = other DNA
cgtaaggccctcgagcatgtta

SEQ ID NO: 9939 - DNA, 22 bp, synthetic construct
  misc_feature 1..22: note = Synthetic construct
  source 1..22: mol_type = other DNA
gtaaggccctcgagcatgttac

SEQ ID NO: 9940 - DNA, 22 bp, synthetic construct
  misc_feature 1..22: note = Synthetic construct
  source 1..22: mol_type = other DNA
taaggccctcgagcatgttacc

SEQ ID NO: 9941 - DNA, 22 bp, synthetic construct
  misc_feature 1..22: note = Synthetic construct
  source 1..22: mol_type = other DNA
aaggccctcgagcatgttacct

SEQ ID NO: 9942 - DNA, 22 bp, synthetic construct
  misc_feature 1..22: note = Synthetic construct
  source 1..22: mol_type = other DNA
aggccctcgagcatgttaccta

SEQ ID NO: 9943 - DNA, 22 bp, synthetic construct
  misc_feature 1..22: note = Synthetic construct
  source 1..22: mol_type = other DNA
ggccctcgagcatgttacctac

SEQ ID NO: 9944 - DNA, 22 bp, synthetic construct
  misc_feature 1..22: note = Synthetic construct
  source 1..22: mol_type = other DNA
gccctcgagcatgttacctaca

SEQ ID NO: 9945 - DNA, 22 bp, synthetic construct
  misc_feature 1..22: note = Synthetic construct
  source 1..22: mol_type = other DNA
ccctcgagcatgttacctacag

SEQ ID NO: 9946 - DNA, 22 bp, synthetic construct
  misc_feature 1..22: note = Synthetic construct
  source 1..22: mol_type = other DNA
cctcgagcatgttacctacagg

SEQ ID NO: 9947 - DNA, 22 bp, synthetic construct
  misc_feature 1..22: note = Synthetic construct
  source 1..22: mol_type = other DNA
ctcgagcatgttacctacaggt

SEQ ID NO: 9948 - DNA, 22 bp, synthetic construct
  misc_feature 1..22: note = Synthetic construct
  source 1..22: mol_type = other DNA
tcgagcatgttacctacaggta

SEQ ID NO: 9949 - DNA, 22 bp, synthetic construct
  misc_feature 1..22: note = Synthetic construct
  source 1..22: mol_type = other DNA
cgagcatgttacctacaggtag

SEQ ID NO: 9950 - DNA, 22 bp, synthetic construct
  misc_feature 1..22: note = Synthetic construct
  source 1..22: mol_type = other DNA
gagcatgttacctacaggtagg

SEQ ID NO: 9951 - DNA, 22 bp, synthetic construct
  misc_feature 1..22: note = Synthetic construct
  source 1..22: mol_type = other DNA
agcatgttacctacaggtagga

SEQ ID NO: 9952 - DNA, 22 bp, synthetic construct
  misc_feature 1..22: note = Synthetic construct
  source 1..22: mol_type = other DNA
gcatgttacctacaggtaggag

SEQ ID NO: 9953 - DNA, 22 bp, synthetic construct
  misc_feature 1..22: note = Synthetic construct
  source 1..22: mol_type = other DNA
catgttacctacaggtaggagc

SEQ ID NO: 9954 - DNA, 22 bp, synthetic construct
  misc_feature 1..22: note = Synthetic construct
  source 1..22: mol_type = other DNA
atgttacctacaggtaggagcc

SEQ ID NO: 9955 - DNA, 22 bp, synthetic construct
  misc_feature 1..22: note = Synthetic construct
  source 1..22: mol_type = other DNA
tgttacctacaggtaggagcca

SEQ ID NO: 9956 - DNA, 22 bp, synthetic construct
  misc_feature 1..22: note = Synthetic construct
  source 1..22: mol_type = other DNA
gttacctacaggtaggagccag

SEQ ID NO: 9957 - DNA, 22 bp, synthetic construct
  misc_feature 1..22: note = Synthetic construct
  source 1..22: mol_type = other DNA
ttacctacaggtaggagccagt

SEQ ID NO: 9958 - DNA, 22 bp, synthetic construct
  misc_feature 1..22: note = Synthetic construct
  source 1..22: mol_type = other DNA
tacctacaggtaggagccagtc

SEQ ID NO: 9959 - DNA, 22 bp, synthetic construct
  misc_feature 1..22: note = Synthetic construct
  source 1..22: mol_type = other DNA
acctacaggtaggagccagtcg

SEQ ID NO: 9960 - DNA, 22 bp, synthetic construct
  misc_feature 1..22: note = Synthetic construct
  source 1..22: mol_type = other DNA
cctacaggtaggagccagtcga

SEQ ID NO: 9961 - DNA, 22 bp, synthetic construct
  misc_feature 1..22: note = Synthetic construct
  source 1..22: mol_type = other DNA
ctacaggtaggagccagtcgac

SEQ ID NO: 9962 - DNA, 22 bp, synthetic construct
  misc_feature 1..22: note = Synthetic construct
  source 1..22: mol_type = other DNA
tacaggtaggagccagtcgaca

SEQ ID NO: 9963 - DNA, 22 bp, synthetic construct
  misc_feature 1..22: note = Synthetic construct
  source 1..22: mol_type = other DNA
acaggtaggagccagtcgacaa

SEQ ID NO: 9964 - DNA, 22 bp, synthetic construct
  misc_feature 1..22: note = Synthetic construct
  source 1..22: mol_type = other DNA
caggtaggagccagtcgacaac

SEQ ID NO: 9965 - DNA, 22 bp, synthetic construct
  misc_feature 1..22: note = Synthetic construct
  source 1..22: mol_type = other DNA
aggtaggagccagtcgacaacg

SEQ ID NO: 9966 - DNA, 22 bp, synthetic construct
  misc_feature 1..22: note = Synthetic construct
  source 1..22: mol_type = other DNA
ggtaggagccagtcgacaacga

SEQ ID NO: 9967 - DNA, 22 bp, synthetic construct
  misc_feature 1..22: note = Synthetic construct
  source 1..22: mol_type = other DNA
gtaggagccagtcgacaacgaa

SEQ ID NO: 9968 - DNA, 22 bp, synthetic construct
  misc_feature 1..22: note = Synthetic construct
  source 1..22: mol_type = other DNA
taggagccagtcgacaacgaat

SEQ ID NO: 9969 - DNA, 22 bp, synthetic construct
  misc_feature 1..22: note = Synthetic construct
  source 1..22: mol_type = other DNA
aggagccagtcgacaacgaatg

SEQ ID NO: 9970 - DNA, 22 bp, synthetic construct
  misc_feature 1..22: note = Synthetic construct
  source 1..22: mol_type = other DNA
ggagccagtcgacaacgaatga

SEQ ID NO: 9971 - DNA, 22 bp, synthetic construct
  misc_feature 1..22: note = Synthetic construct
  source 1..22: mol_type = other DNA
gagccagtcgacaacgaatgag

SEQ ID NO: 9972 - DNA, 22 bp, synthetic construct
  misc_feature 1..22: note = Synthetic construct
  source 1..22: mol_type = other DNA
agccagtcgacaacgaatgaga

SEQ ID NO: 9973 - DNA, 22 bp, synthetic construct
  misc_feature 1..22: note = Synthetic construct
  source 1..22: mol_type = other DNA
gccagtcgacaacgaatgagaa

SEQ ID NO: 9974 - DNA, 22 bp, synthetic construct
  misc_feature 1..22: note = Synthetic construct
  source 1..22: mol_type = other DNA
ccagtcgacaacgaatgagaaa

SEQ ID NO: 9975 - DNA, 22 bp, synthetic construct
  misc_feature 1..22: note = Synthetic construct
  source 1..22: mol_type = other DNA
cagtcgacaacgaatgagaaag

SEQ ID NO: 9976 - DNA, 22 bp, synthetic construct
  misc_feature 1..22: note = Synthetic construct
  source 1..22: mol_type = other DNA
agtcgacaacgaatgagaaagg

SEQ ID NO: 9977 - DNA, 22 bp, synthetic construct
  misc_feature 1..22: note = Synthetic construct
  source 1..22: mol_type = other DNA
gtcgacaacgaatgagaaaggc

SEQ ID NO: 9978 - DNA, 22 bp, synthetic construct
  misc_feature 1..22: note = Synthetic construct
  source 1..22: mol_type = other DNA
tcgacaacgaatgagaaaggca

SEQ ID NO: 9979 - DNA, 22 bp, synthetic construct
  misc_feature 1..22: note = Synthetic construct
  source 1..22: mol_type = other DNA
cgacaacgaatgagaaaggcac

SEQ ID NO: 9980 - DNA, 22 bp, synthetic construct
  misc_feature 1..22: note = Synthetic construct
  source 1..22: mol_type = other DNA
gacaacgaatgagaaaggcacc

SEQ ID NO: 9981 - DNA, 22 bp, synthetic construct
  misc_feature 1..22: note = Synthetic construct
  source 1..22: mol_type = other DNA
acaacgaatgagaaaggcacct

SEQ ID NO: 9982 - DNA, 22 bp, synthetic construct
  misc_feature 1..22: note = Synthetic construct
  source 1..22: mol_type = other DNA
caacgaatgagaaaggcacctt

SEQ ID NO: 9983 - DNA, 22 bp, synthetic construct
  misc_feature 1..22: note = Synthetic construct
  source 1..22: mol_type = other DNA
aacgaatgagaaaggcaccttt

SEQ ID NO: 9984 - DNA, 22 bp, synthetic construct
  misc_feature 1..22: note = Synthetic construct
  source 1..22: mol_type = other DNA
acgaatgagaaaggcacctttt

SEQ ID NO: 9985 - DNA, 22 bp, synthetic construct
  misc_feature 1..22: note = Synthetic construct
  source 1..22: mol_type = other DNA
cgaatgagaaaggcaccttttc

SEQ ID NO: 9986 - DNA, 22 bp, synthetic construct
  misc_feature 1..22: note = Synthetic construct
  source 1..22: mol_type = other DNA
gaatgagaaaggcaccttttcc

SEQ ID NO: 9987 - DNA, 22 bp, synthetic construct
  misc_feature 1..22: note = Synthetic construct
  source 1..22: mol_type = other DNA
aatgagaaaggcaccttttccc

SEQ ID NO: 9988 - DNA, 22 bp, synthetic construct
  misc_feature 1..22: note = Synthetic construct
  source 1..22: mol_type = other DNA
atgagaaaggcaccttttccca

SEQ ID NO: 9989 - DNA, 22 bp, synthetic construct
  misc_feature 1..22: note = Synthetic construct
  source 1..22: mol_type = other DNA
tgagaaaggcaccttttcccac

SEQ ID NO: 9990 - DNA, 22 bp, synthetic construct
  misc_feature 1..22: note = Synthetic construct
  source 1..22: mol_type = other DNA
gagaaaggcaccttttcccaca

SEQ ID NO: 9991 - DNA, 22 bp, synthetic construct
  misc_feature 1..22: note = Synthetic construct
  source 1..22: mol_type = other DNA
agaaaggcaccttttcccacac

SEQ ID NO: 9992 - DNA, 22 bp, synthetic construct
  misc_feature 1..22: note = Synthetic construct
  source 1..22: mol_type = other DNA
gaaaggcaccttttcccacact

SEQ ID NO: 9993 - DNA, 22 bp, synthetic construct
  misc_feature 1..22: note = Synthetic construct
  source 1..22: mol_type = other DNA
aaaggcaccttttcccacacta

SEQ ID NO: 9994 - DNA, 22 bp, synthetic construct
  misc_feature 1..22: note = Synthetic construct
  source 1..22: mol_type = other DNA
aaggcaccttttcccacactat

SEQ ID NO: 9995 - DNA, 22 bp, synthetic construct
  misc_feature 1..22: note = Synthetic construct
  source 1..22: mol_type = other DNA
aggcaccttttcccacactata

SEQ ID NO: 9996 - DNA, 22 bp, synthetic construct
  misc_feature 1..22: note = Synthetic construct
  source 1..22: mol_type = other DNA
ggcaccttttcccacactatac

SEQ ID NO: 9997 - DNA, 22 bp, synthetic construct
  misc_feature 1..22: note = Synthetic construct
  source 1..22: mol_type = other DNA
gcaccttttcccacactatacc

SEQ ID NO: 9998 - DNA, 22 bp, synthetic construct
  misc_feature 1..22: note = Synthetic construct
  source 1..22: mol_type = other DNA
caccttttcccacactatacct

SEQ ID NO: 9999 - DNA, 22 bp, synthetic construct
  misc_feature 1..22: note = Synthetic construct
  source 1..22: mol_type = other DNA
accttttcccacactataccta

SEQ ID NO: 10000 - DNA, 22 bp, synthetic construct
  misc_feature 1..22: note = Synthetic construct
  source 1..22: mol_type = other DNA
ccttttcccacactatacctag

SEQ ID NO: 10001 - DNA, 22 bp, synthetic construct
  misc_feature 1..22: note = Synthetic construct
  source 1..22: mol_type = other DNA
cttttcccacactatacctagt

SEQ ID NO: 10002 - DNA, 22 bp, synthetic construct
  misc_feature 1..22: note = Synthetic construct
  source 1..22: mol_type = other DNA
ttttcccacactatacctagtg

SEQ ID NO: 10003 - DNA, 22 bp, synthetic construct
  misc_feature 1..22: note = Synthetic construct
  source 1..22: mol_type = other DNA
tttcccacactatacctagtgg

SEQ ID NO: 10004 - DNA, 22 bp, synthetic construct
  misc_feature 1..22: note = Synthetic construct
  source 1..22: mol_type = other DNA
ttcccacactatacctagtggg

SEQ ID NO: 10005 - DNA, 22 bp, synthetic construct
  misc_feature 1..22: note = Synthetic construct
  source 1..22: mol_type = other DNA
tcccacactatacctagtgggt

SEQ ID NO: 10006 - DNA, 22 bp, synthetic construct
  misc_feature 1..22: note = Synthetic construct
  source 1..22: mol_type = other DNA
cccacactatacctagtgggtt

SEQ ID NO: 10007 - DNA, 22 bp, synthetic construct
  misc_feature 1..22: note = Synthetic construct
  source 1..22: mol_type = other DNA
ccacactatacctagtgggttc

SEQ ID NO: 10008 - DNA, 22 bp, synthetic construct
  misc_feature 1..22: note = Synthetic construct
  source 1..22: mol_type = other DNA
cacactatacctagtgggttca

SEQ ID NO: 10009 - DNA, 22 bp, synthetic construct
  misc_feature 1..22: note = Synthetic construct
  source 1..22: mol_type = other DNA
acactatacctagtgggttcaa

SEQ ID NO: 10010 - DNA, 22 bp, synthetic construct
  misc_feature 1..22: note = Synthetic construct
  source 1..22: mol_type = other DNA
cactatacctagtgggttcaag

SEQ ID NO: 10011 - DNA, 22 bp, synthetic construct
  misc_feature 1..22: note = Synthetic construct
  source 1..22: mol_type = other DNA
actatacctagtgggttcaaga

SEQ ID NO: 10012 - DNA, 22 bp, synthetic construct
  misc_feature 1..22: note = Synthetic construct
  source 1..22: mol_type = other DNA
ctatacctagtgggttcaagat

SEQ ID NO: 10013 - DNA, 22 bp, synthetic construct
  misc_feature 1..22: note = Synthetic construct
  source 1..22: mol_type = other DNA
tatacctagtgggttcaagata

SEQ ID NO: 10014 - DNA, 22 bp, synthetic construct
  misc_feature 1..22: note = Synthetic construct
  source 1..22: mol_type = other DNA
atacctagtgggttcaagatac

SEQ ID NO: 10015 - DNA, 22 bp, synthetic construct
  misc_feature 1..22: note = Synthetic construct
  source 1..22: mol_type = other DNA
tacctagtgggttcaagatacc

SEQ ID NO: 10016 - DNA, 22 bp, synthetic construct
  misc_feature 1..22: note = Synthetic construct
  source 1..22: mol_type = other DNA
acctagtgggttcaagatacct

SEQ ID NO: 10017 - DNA, 22 bp, synthetic construct
  misc_feature 1..22: note = Synthetic construct
  source 1..22: mol_type = other DNA
cctagtgggttcaagataccta

SEQ ID NO: 10018 - DNA, 22 bp, synthetic construct
  misc_feature 1..22: note = Synthetic construct
  source 1..22: mol_type = other DNA
ctagtgggttcaagatacctag

SEQ ID NO: 10019 - DNA, 22 bp, synthetic construct
  misc_feature 1..22: note = Synthetic construct
  source 1..22: mol_type = other DNA
tagtgggttcaagatacctaga

SEQ ID NO: 10020 - DNA, 22 bp, synthetic construct
  misc_feature 1..22: note = Synthetic construct
  source 1..22: mol_type = other DNA
agtgggttcaagatacctagag

SEQ ID NO: 10021 - DNA, 22 bp, synthetic construct
  misc_feature 1..22: note = Synthetic construct
  source 1..22: mol_type = other DNA
gtgggttcaagatacctagaga

SEQ ID NO: 10022 - DNA, 22 bp, synthetic construct
  misc_feature 1..22: note = Synthetic construct
  source 1..22: mol_type = other DNA
tgggttcaagatacctagagac

SEQ ID NO: 10023 - DNA, 22 bp, synthetic construct
  misc_feature 1..22: note = Synthetic construct
  source 1..22: mol_type = other DNA
gggttcaagatacctagagacg

SEQ ID NO: 10024 - DNA, 22 bp, synthetic construct
  misc_feature 1..22: note = Synthetic construct
  source 1..22: mol_type = other DNA
ggttcaagatacctagagacga

SEQ ID NO: 10025 - DNA, 22 bp, synthetic construct
  misc_feature 1..22: note = Synthetic construct
  source 1..22: mol_type = other DNA
gttcaagatacctagagacgac

SEQ ID NO: 10026 - DNA, 22 bp, synthetic construct
  misc_feature 1..22: note = Synthetic construct
  source 1..22: mol_type = other DNA
ttcaagatacctagagacgaca

SEQ ID NO: 10027 - DNA, 22 bp, synthetic construct
  misc_feature 1..22: note = Synthetic construct
  source 1..22: mol_type = other DNA
tcaagatacctagagacgacaa

SEQ ID NO: 10028 - DNA, 22 bp, synthetic construct
  misc_feature 1..22: note = Synthetic construct
  source 1..22: mol_type = other DNA
caagatacctagagacgacaac

SEQ ID NO: 10029 - DNA, 22 bp, synthetic construct
  misc_feature 1..22: note = Synthetic construct
  source 1..22: mol_type = other DNA
aagatacctagagacgacaacc

SEQ ID NO: 10030 - DNA, 22 bp, synthetic construct
  misc_feature 1..22: note = Synthetic construct
  source 1..22: mol_type = other DNA
agatacctagagacgacaacca

SEQ ID NO: 10031 - DNA, 22 bp, synthetic construct
  misc_feature 1..22: note = Synthetic construct
  source 1..22: mol_type = other DNA
gatacctagagacgacaaccat

SEQ ID NO: 10032 - DNA, 22 bp, synthetic construct
  misc_feature 1..22: note = Synthetic construct
  source 1..22: mol_type = other DNA
atacctagagacgacaaccatg

SEQ ID NO: 10033 - DNA, 22 bp, synthetic construct
  misc_feature 1..22: note = Synthetic construct
  source 1..22: mol_type = other DNA
tacctagagacgacaaccatgc

SEQ ID NO: 10034 - DNA, 22 bp, synthetic construct
  misc_feature 1..22: note = Synthetic construct
  source 1..22: mol_type = other DNA
acctagagacgacaaccatgcc

SEQ ID NO: 10035 - DNA, 22 bp, synthetic construct
  misc_feature 1..22: note = Synthetic construct
  source 1..22: mol_type = other DNA
cctagagacgacaaccatgcca

SEQ ID NO: 10036 - DNA, 22 bp, synthetic construct
  misc_feature 1..22: note = Synthetic construct
  source 1..22: mol_type = other DNA
ctagagacgacaaccatgccaa

SEQ ID NO: 10037 - DNA, 22 bp, synthetic construct
  misc_feature 1..22: note = Synthetic construct
  source 1..22: mol_type = other DNA
tagagacgacaaccatgccaaa

SEQ ID NO: 10038 - DNA, 22 bp, synthetic construct
  misc_feature 1..22: note = Synthetic construct
  source 1..22: mol_type = other DNA
agagacgacaaccatgccaaac

SEQ ID NO: 10039 - DNA, 22 bp, synthetic construct
  misc_feature 1..22: note = Synthetic construct
  source 1..22: mol_type = other DNA
gagacgacaaccatgccaaacg

SEQ ID NO: 10040 - DNA, 22 bp, synthetic construct
  misc_feature 1..22: note = Synthetic construct
  source 1..22: mol_type = other DNA
agacgacaaccatgccaaacgt

SEQ ID NO: 10041 - DNA, 22 bp, synthetic construct
  misc_feature 1..22: note = Synthetic construct
  source 1..22: mol_type = other DNA
gacgacaaccatgccaaacgtg

SEQ ID NO: 10042 - DNA, 22 bp, synthetic construct
  misc_feature 1..22: note = Synthetic construct
  source 1..22: mol_type = other DNA
acgacaaccatgccaaacgtgc

SEQ ID NO: 10043 - DNA, 22 bp, synthetic construct
  misc_feature 1..22: note = Synthetic construct
  source 1..22: mol_type = other DNA
cgacaaccatgccaaacgtgca

SEQ ID NO: 10044 - DNA, 22 bp, synthetic construct
  misc_feature 1..22: note = Synthetic construct
  source 1..22: mol_type = other DNA
gacaaccatgccaaacgtgcat

SEQ ID NO: 10045 - DNA, 22 bp, synthetic construct
  misc_feature 1..22: note = Synthetic construct
  source 1..22: mol_type = other DNA
acaaccatgccaaacgtgcatc

SEQ ID NO: 10046 - DNA, 22 bp, synthetic construct
  misc_feature 1..22: note = Synthetic construct
  source 1..22: mol_type = other DNA
caaccatgccaaacgtgcatcg

SEQ ID NO: 10047 - DNA, 22 bp, synthetic construct
  misc_feature 1..22: note = Synthetic construct
  source 1..22: mol_type = other DNA
aaccatgccaaacgtgcatcgt

SEQ ID NO: 10048 - DNA, 22 bp, synthetic construct
  misc_feature 1..22: note = Synthetic construct
  source 1..22: mol_type = other DNA
accatgccaaacgtgcatcgtt

SEQ ID NO: 10049 - DNA, 22 bp, synthetic construct
  misc_feature 1..22: note = Synthetic construct
  source 1..22: mol_type = other DNA
ccatgccaaacgtgcatcgttt

SEQ ID NO: 10050 - DNA, 22 bp, synthetic construct
  misc_feature 1..22: note = Synthetic construct
  source 1..22: mol_type = other DNA
catgccaaacgtgcatcgttta

SEQ ID NO: 10051 - DNA, 22 bp, synthetic construct
  misc_feature 1..22: note = Synthetic construct
  source 1..22: mol_type = other DNA
atgccaaacgtgcatcgtttat

SEQ ID NO: 10052 - DNA, 22 bp, synthetic construct
  misc_feature 1..22: note = Synthetic construct
  source 1..22: mol_type = other DNA
tgccaaacgtgcatcgtttatg

SEQ ID NO: 10053 - DNA, 22 bp, synthetic construct
  misc_feature 1..22: note = Synthetic construct
  source 1..22: mol_type = other DNA
gccaaacgtgcatcgtttatgt

SEQ ID NO: 10054 - DNA, 22 bp, synthetic construct
  misc_feature 1..22: note = Synthetic construct
  source 1..22: mol_type = other DNA
ccaaacgtgcatcgtttatgta

SEQ ID NO: 10055 - DNA, 22 bp, synthetic construct
  misc_feature 1..22: note = Synthetic construct
  source 1..22: mol_type = other DNA
caaacgtgcatcgtttatgtaa

SEQ ID NO: 10056 - DNA, 22 bp, synthetic construct
  misc_feature 1..22: note = Synthetic construct
  source 1..22: mol_type = other DNA
aaacgtgcatcgtttatgtaaa

SEQ ID NO: 10057 - DNA, 22 bp, synthetic construct
  misc_feature 1..22: note = Synthetic construct
  source 1..22: mol_type = other DNA
aacgtgcatcgtttatgtaaaa

SEQ ID NO: 10058 - DNA, 22 bp, synthetic construct
  misc_feature 1..22: note = Synthetic construct
  source 1..22: mol_type = other DNA
acgtgcatcgtttatgtaaaac

SEQ ID NO: 10059 - DNA, 22 bp, synthetic construct
  misc_feature 1..22: note = Synthetic construct
  source 1..22: mol_type = other DNA
cgtgcatcgtttatgtaaaacc

SEQ ID NO: 10060 - DNA, 22 bp, synthetic construct
  misc_feature 1..22: note = Synthetic construct
  source 1..22: mol_type = other DNA
gtgcatcgtttatgtaaaacca

SEQ ID NO: 10061 - DNA, 22 bp, synthetic construct
  misc_feature 1..22: note = Synthetic construct
  source 1..22: mol_type = other DNA
tgcatcgtttatgtaaaaccat

SEQ ID NO: 10062 - DNA, 22 bp, synthetic construct
  misc_feature 1..22: note = Synthetic construct
  source 1..22: mol_type = other DNA
gcatcgtttatgtaaaaccata

SEQ ID NO: 10063 - DNA, 22 bp, synthetic construct
  misc_feature 1..22: note = Synthetic construct
  source 1..22: mol_type = other DNA
catcgtttatgtaaaaccatat

SEQ ID NO: 10064 - DNA, 22 bp, synthetic construct
  misc_feature 1..22: note = Synthetic construct
  source 1..22: mol_type = other DNA
atcgtttatgtaaaaccatatc

SEQ ID NO: 10065 - DNA, 22 bp, synthetic construct
  misc_feature 1..22: note = Synthetic construct
  source 1..22: mol_type = other DNA
tcgtttatgtaaaaccatatca

SEQ ID NO: 10066 - DNA, 22 bp, synthetic construct
  misc_feature 1..22: note = Synthetic construct
  source 1..22: mol_type = other DNA
cgtttatgtaaaaccatatcac

SEQ ID NO: 10067 - DNA, 22 bp, synthetic construct
  misc_feature 1..22: note = Synthetic construct
  source 1..22: mol_type = other DNA
gtttatgtaaaaccatatcacg

SEQ ID NO: 10068 - DNA, 22 bp, synthetic construct
  misc_feature 1..22: note = Synthetic construct
  source 1..22: mol_type = other DNA
tttatgtaaaaccatatcacga

SEQ ID NO: 10069 - DNA, 22 bp, synthetic construct
  misc_feature 1..22: note = Synthetic construct
  source 1..22: mol_type = other DNA
ttatgtaaaaccatatcacgat

SEQ ID NO: 10070 - DNA, 22 bp, synthetic construct
  misc_feature 1..22: note = Synthetic construct
  source 1..22: mol_type = other DNA
tatgtaaaaccatatcacgata

SEQ ID NO: 10071 - DNA, 22 bp, synthetic construct
  misc_feature 1..22: note = Synthetic construct
  source 1..22: mol_type = other DNA
atgtaaaaccatatcacgatac

SEQ ID NO: 10072 - DNA, 22 bp, synthetic construct
  misc_feature 1..22: note = Synthetic construct
  source 1..22: mol_type = other DNA
tgtaaaaccatatcacgatacg

SEQ ID NO: 10073 - DNA, 22 bp, synthetic construct
  misc_feature 1..22: note = Synthetic construct
  source 1..22: mol_type = other DNA
gtaaaaccatatcacgatacgt

SEQ ID NO: 10074 - DNA, 22 bp, synthetic construct
  misc_feature 1..22: note = Synthetic construct
  source 1..22: mol_type = other DNA
taaaaccatatcacgatacgtc

SEQ ID NO: 10075 - DNA, 22 bp, synthetic construct
  misc_feature 1..22: note = Synthetic construct
  source 1..22: mol_type = other DNA
aaaaccatatcacgatacgtcg

SEQ ID NO: 10076 - DNA, 22 bp, synthetic construct
  misc_feature 1..22: note = Synthetic construct
  source 1..22: mol_type = other DNA
aaaccatatcacgatacgtcgc

SEQ ID NO: 10077 - DNA, 22 bp, synthetic construct
  misc_feature 1..22: note = Synthetic construct
  source 1..22: mol_type = other DNA
aaccatatcacgatacgtcgcg

SEQ ID NO: 10078 - DNA, 22 bp, synthetic construct
  misc_feature 1..22: note = Synthetic construct
  source 1..22: mol_type = other DNA
accatatcacgatacgtcgcga

SEQ ID NO: 10079 - DNA, 22 bp, synthetic construct
  misc_feature 1..22: note = Synthetic construct
  source 1..22: mol_type = other DNA
ccatatcacgatacgtcgcgat

SEQ ID NO: 10080 - DNA, 22 bp, synthetic construct
  misc_feature 1..22: note = Synthetic construct
  source 1..22: mol_type = other DNA
catatcacgatacgtcgcgata

SEQ ID NO: 10081 - DNA, 22 bp, synthetic construct
  misc_feature 1..22: note = Synthetic construct
  source 1..22: mol_type = other DNA
atatcacgatacgtcgcgatat

SEQ ID NO: 10082 - DNA, 22 bp, synthetic construct
  misc_feature 1..22: note = Synthetic construct
  source 1..22: mol_type = other DNA
tatcacgatacgtcgcgatatg

SEQ ID NO: 10083 - DNA, 22 bp, synthetic construct
  misc_feature 1..22: note = Synthetic construct
  source 1..22: mol_type = other DNA
atcacgatacgtcgcgatatgt

SEQ ID NO: 10084 - DNA, 22 bp, synthetic construct
  misc_feature 1..22: note = Synthetic construct
  source 1..22: mol_type = other DNA
tcacgatacgtcgcgatatgtt

SEQ ID NO: 10085 - DNA, 22 bp, synthetic construct
  misc_feature 1..22: note = Synthetic construct
  source 1..22: mol_type = other DNA
cacgatacgtcgcgatatgttg

SEQ ID NO: 10086 - DNA, 22 bp, synthetic construct
  misc_feature 1..22: note = Synthetic construct
  source 1..22: mol_type = other DNA
acgatacgtcgcgatatgttgc

SEQ ID NO: 10087 - DNA, 22 bp, synthetic construct
  misc_feature 1..22: note = Synthetic construct
  source 1..22: mol_type = other DNA
cgatacgtcgcgatatgttgca

SEQ ID NO: 10088 - DNA, 22 bp, synthetic construct
  misc_feature 1..22: note = Synthetic construct
  source 1..22: mol_type = other DNA
gatacgtcgcgatatgttgcac

SEQ ID NO: 10089 - DNA, 22 bp, synthetic construct
  misc_feature 1..22: note = Synthetic construct
  source 1..22: mol_type = other DNA
atacgtcgcgatatgttgcacg

SEQ ID NO: 10090 - DNA, 22 bp, synthetic construct
  misc_feature 1..22: note = Synthetic construct
  source 1..22: mol_type = other DNA
tacgtcgcgatatgttgcacgt

SEQ ID NO: 10091 - DNA, 22 bp, synthetic construct
  misc_feature 1..22: note = Synthetic construct
  source 1..22: mol_type = other DNA
acgtcgcgatatgttgcacgtt

SEQ ID NO: 10092 - DNA, 22 bp, synthetic construct
  misc_feature 1..22: note = Synthetic construct
  source 1..22: mol_type = other DNA
cgtcgcgatatgttgcacgttg

SEQ ID NO: 10093 - DNA, 22 bp, synthetic construct
  misc_feature 1..22: note = Synthetic construct
  source 1..22: mol_type = other DNA
gtcgcgatatgttgcacgttgt

SEQ ID NO: 10094 - DNA, 22 bp, synthetic construct
  misc_feature 1..22: note = Synthetic construct
  source 1..22: mol_type = other DNA
tcgcgatatgttgcacgttgtc

SEQ ID NO: 10095 - DNA, 22 bp, synthetic construct
  misc_feature 1..22: note = Synthetic construct
  source 1..22: mol_type = other DNA
cgcgatatgttgcacgttgtct

SEQ ID NO: 10096 - DNA, 22 bp, synthetic construct
  misc_feature 1..22: note = Synthetic construct
  source 1..22: mol_type = other DNA
gcgatatgttgcacgttgtctg

SEQ ID NO: 10097 - DNA, 22 bp, synthetic construct
  misc_feature 1..22: note = Synthetic construct
  source 1..22: mol_type = other DNA
cgatatgttgcacgttgtctgg

SEQ ID NO: 10098 - DNA, 22 bp, synthetic construct
  misc_feature 1..22: note = Synthetic construct
  source 1..22: mol_type = other DNA
gatatgttgcacgttgtctgga

SEQ ID NO: 10099 - DNA, 22 bp, synthetic construct
  misc_feature 1..22: note = Synthetic construct
  source 1..22: mol_type = other DNA
atatgttgcacgttgtctggaa

SEQ ID NO: 10100 - DNA, 22 bp, synthetic construct
  misc_feature 1..22: note = Synthetic construct
  source 1..22: mol_type = other DNA
tatgttgcacgttgtctggaag

SEQ ID NO: 10101 - DNA, 22 bp, synthetic construct
  misc_feature 1..22: note = Synthetic construct
  source 1..22: mol_type = other DNA
atgttgcacgttgtctggaagt

SEQ ID NO: 10102 - DNA, 22 bp, synthetic construct
  misc_feature 1..22: note = Synthetic construct
  source 1..22: mol_type = other DNA
tgttgcacgttgtctggaagtt

SEQ ID NO: 10103 - DNA, 22 bp, synthetic construct
  misc_feature 1..22: note = Synthetic construct
  source 1..22: mol_type = other DNA
gttgcacgttgtctggaagttt

SEQ ID NO: 10104 - DNA, 22 bp, synthetic construct
  misc_feature 1..22: note = Synthetic construct
  source 1..22: mol_type = other DNA
ttgcacgttgtctggaagtttg

SEQ ID NO: 10105 - DNA, 22 bp, synthetic construct
  misc_feature 1..22: note = Synthetic construct
  source 1..22: mol_type = other DNA
tgcacgttgtctggaagtttgc

SEQ ID NO: 10106 - DNA, 22 bp, synthetic construct
  misc_feature 1..22: note = Synthetic construct
  source 1..22: mol_type = other DNA
gcacgttgtctggaagtttgca

SEQ ID NO: 10107 - DNA, 22 bp, synthetic construct
  misc_feature 1..22: note = Synthetic construct
  source 1..22: mol_type = other DNA
cacgttgtctggaagtttgcag

SEQ ID NO: 10108 - DNA, 22 bp, synthetic construct
  misc_feature 1..22: note = Synthetic construct
  source 1..22: mol_type = other DNA
acgttgtctggaagtttgcagc

SEQ ID NO: 10109 - DNA, 22 bp, synthetic construct
  misc_feature 1..22: note = Synthetic construct
  source 1..22: mol_type = other DNA
cgttgtctggaagtttgcagct

SEQ ID NO: 10110 - DNA, 22 bp, synthetic construct
  misc_feature 1..22: note = Synthetic construct
  source 1..22: mol_type = other DNA
gttgtctggaagtttgcagctg

SEQ ID NO: 10111 - DNA, 22 bp, synthetic construct
  misc_feature 1..22: note = Synthetic construct
  source 1..22: mol_type = other DNA
ttgtctggaagtttgcagctgg

SEQ ID NO: 10112 - DNA, 22 bp, synthetic construct
  misc_feature 1..22: note = Synthetic construct
  source 1..22: mol_type = other DNA
tgtctggaagtttgcagctgga

SEQ ID NO: 10113 - DNA, 22 bp, synthetic construct
  misc_feature 1..22: note = Synthetic construct
  source 1..22: mol_type = other DNA
gtctggaagtttgcagctggat

SEQ ID NO: 10114 - DNA, 22 bp, synthetic construct
  misc_feature 1..22: note = Synthetic construct
  source 1..22: mol_type = other DNA
tctggaagtttgcagctggata

SEQ ID NO: 10115 - DNA, 22 bp, synthetic construct
  misc_feature 1..22: note = Synthetic construct
  source 1..22: mol_type = other DNA
ctggaagtttgcagctggatac

SEQ ID NO: 10116 - DNA, 22 bp, synthetic construct
  misc_feature 1..22: note = Synthetic construct
  source 1..22: mol_type = other DNA
tggaagtttgcagctggatacg

SEQ ID NO: 10117 - DNA, 22 bp, synthetic construct
  misc_feature 1..22: note = Synthetic construct
  source 1..22: mol_type = other DNA
ggaagtttgcagctggatacga

SEQ ID NO: 10118 - DNA, 22 bp, synthetic construct
  misc_feature 1..22: note = Synthetic construct
  source 1..22: mol_type = other DNA
gaagtttgcagctggatacgac

SEQ ID NO: 10119 - DNA, 22 bp, synthetic construct
  misc_feature 1..22: note = Synthetic construct
  source 1..22: mol_type = other DNA
aagtttgcagctggatacgaca

SEQ ID NO: 10120 - DNA, 22 bp, synthetic construct
  misc_feature 1..22: note = Synthetic construct
  source 1..22: mol_type = other DNA
agtttgcagctggatacgacag

SEQ ID NO: 10121 - DNA, 22 bp, synthetic construct
  misc_feature 1..22: note = Synthetic construct
  source 1..22: mol_type = other DNA
gtttgcagctggatacgacaga

SEQ ID NO: 10122 - DNA, 22 bp, synthetic construct
  misc_feature 1..22: note = Synthetic construct
  source 1..22: mol_type = other DNA
tttgcagctggatacgacagac

SEQ ID NO: 10123 - DNA, 22 bp, synthetic construct
  misc_feature 1..22: note = Synthetic construct
  source 1..22: mol_type = other DNA
ttgcagctggatacgacagacg

SEQ ID NO: 10124 - DNA, 22 bp, synthetic construct
  misc_feature 1..22: note = Synthetic construct
  source 1..22: mol_type = other DNA
tgcagctggatacgacagacgg

SEQ ID NO: 10125 - DNA, 22 bp, synthetic construct
  misc_feature 1..22: note = Synthetic construct
  source 1..22: mol_type = other DNA
gcagctggatacgacagacggc

SEQ ID NO: 10126 - DNA, 22 bp, synthetic construct
  misc_feature 1..22: note = Synthetic construct
  source 1..22: mol_type = other DNA
cagctggatacgacagacggcc

SEQ ID NO: 10127 - DNA, 22 bp, synthetic construct
  misc_feature 1..22: note = Synthetic construct
  source 1..22: mol_type = other DNA
agctggatacgacagacggcca

SEQ ID NO: 10128 - DNA, 22 bp, synthetic construct
  misc_feature 1..22: note = Synthetic construct
  source 1..22: mol_type = other DNA
gctggatacgacagacggccat

SEQ ID NO: 10129 - DNA, 22 bp, synthetic construct
  misc_feature 1..22: note = Synthetic construct
  source 1..22: mol_type = other DNA
ctggatacgacagacggccatc

SEQ ID NO: 10130 - DNA, 22 bp, synthetic construct
  misc_feature 1..22: note = Synthetic construct
  source 1..22: mol_type = other DNA
tggatacgacagacggccatct

SEQ ID NO: 10131 - DNA, 22 bp, synthetic construct
  misc_feature 1..22: note = Synthetic construct
  source 1..22: mol_type = other DNA
ggatacgacagacggccatcta

SEQ ID NO: 10132 - DNA, 22 bp, synthetic construct
  misc_feature 1..22: note = Synthetic construct
  source 1..22: mol_type = other DNA
gatacgacagacggccatctaa

SEQ ID NO: 10133 - DNA, 22 bp, synthetic construct
  misc_feature 1..22: note = Synthetic construct
  source 1..22: mol_type = other DNA
atacgacagacggccatctaac

SEQ ID NO: 10134 - DNA, 22 bp, synthetic construct
  misc_feature 1..22: note = Synthetic construct
  source 1..22: mol_type = other DNA
tacgacagacggccatctaact

SEQ ID NO: 10135 - DNA, 22 bp, synthetic construct
  misc_feature 1..22: note = Synthetic construct
  source 1..22: mol_type = other DNA
acgacagacggccatctaactt

SEQ ID NO: 10136 - DNA, 22 bp, synthetic construct
  misc_feature 1..22: note = Synthetic construct
  source 1..22: mol_type = other DNA
cgacagacggccatctaacttg

SEQ ID NO: 10137 - DNA, 22 bp, synthetic construct
  misc_feature 1..22: note = Synthetic construct
  source 1..22: mol_type = other DNA
gacagacggccatctaacttga

SEQ ID NO: 10138 - DNA, 22 bp, synthetic construct
  misc_feature 1..22: note = Synthetic construct
  source 1..22: mol_type = other DNA
acagacggccatctaacttgat

SEQ ID NO: 10139 - DNA, 22 bp, synthetic construct
  misc_feature 1..22: note = Synthetic construct
  source 1..22: mol_type = other DNA
cagacggccatctaacttgatg

SEQ ID NO: 10140 - DNA, 22 bp, synthetic construct
  misc_feature 1..22: note = Synthetic construct
  source 1..22: mol_type = other DNA
agacggccatctaacttgatgt

SEQ ID NO: 10141 - DNA, 22 bp, synthetic construct
  misc_feature 1..22: note = Synthetic construct
  source 1..22: mol_type = other DNA
gacggccatctaacttgatgtt

SEQ ID NO: 10142 - DNA, 22 bp, synthetic construct
  misc_feature 1..22: note = Synthetic construct
  source 1..22: mol_type = other DNA
acggccatctaacttgatgtta

SEQ ID NO: 10143 - DNA, 22 bp, synthetic construct
  misc_feature 1..22: note = Synthetic construct
  source 1..22: mol_type = other DNA
cggccatctaacttgatgttag

SEQ ID NO: 10144 - DNA, 22 bp, synthetic construct
  misc_feature 1..22: note = Synthetic construct
  source 1..22: mol_type = other DNA
ggccatctaacttgatgttagt

SEQ ID NO: 10145 - DNA, 22 bp, synthetic construct
  misc_feature 1..22: note = Synthetic construct
  source 1..22: mol_type = other DNA
gccatctaacttgatgttagta

SEQ ID NO: 10146 - DNA, 22 bp, synthetic construct
  misc_feature 1..22: note = Synthetic construct
  source 1..22: mol_type = other DNA
ccatctaacttgatgttagtac

SEQ ID NO: 10147 - DNA, 22 bp, synthetic construct
  misc_feature 1..22: note = Synthetic construct
  source 1..22: mol_type = other DNA
catctaacttgatgttagtacc

SEQ ID NO: 10148 - DNA, 22 bp, synthetic construct
  misc_feature 1..22: note = Synthetic construct
  source 1..22: mol_type = other DNA
atctaacttgatgttagtaccg

SEQ ID NO: 10149 - DNA, 22 bp, synthetic construct
  misc_feature 1..22: note = Synthetic construct
  source 1..22: mol_type = other DNA
tctaacttgatgttagtaccga

SEQ ID NO: 10150 - DNA, 22 bp, synthetic construct
  misc_feature 1..22: note = Synthetic construct
  source 1..22: mol_type = other DNA
ctaacttgatgttagtaccgac

SEQ ID NO: 10151 - DNA, 22 bp, synthetic construct
  misc_feature 1..22: note = Synthetic construct
  source 1..22: mol_type = other DNA
taacttgatgttagtaccgacc

SEQ ID NO: 10152 - DNA, 22 bp, synthetic construct
  misc_feature 1..22: note = Synthetic construct
  source 1..22: mol_type = other DNA
aacttgatgttagtaccgacct

SEQ ID NO: 10153 - DNA, 22 bp, synthetic construct
  misc_feature 1..22: note = Synthetic construct
  source 1..22: mol_type = other DNA
acttgatgttagtaccgacctg

SEQ ID NO: 10154 - DNA, 22 bp, synthetic construct
  misc_feature 1..22: note = Synthetic construct
  source 1..22: mol_type = other DNA
cttgatgttagtaccgacctga

SEQ ID NO: 10155 - DNA, 22 bp, synthetic construct
  misc_feature 1..22: note = Synthetic construct
  source 1..22: mol_type = other DNA
ttgatgttagtaccgacctgac

SEQ ID NO: 10156 - DNA, 22 bp, synthetic construct
  misc_feature 1..22: note = Synthetic construct
  source 1..22: mol_type = other DNA
tgatgttagtaccgacctgacg

SEQ ID NO: 10157 - DNA, 22 bp, synthetic construct
  misc_feature 1..22: note = Synthetic construct
  source 1..22: mol_type = other DNA
gatgttagtaccgacctgacgt

SEQ ID NO: 10158 - DNA, 22 bp, synthetic construct
  misc_feature 1..22: note = Synthetic construct
  source 1..22: mol_type = other DNA
atgttagtaccgacctgacgta

SEQ ID NO: 10159 - DNA, 22 bp, synthetic construct
  misc_feature 1..22: note = Synthetic construct
  source 1..22: mol_type = other DNA
tgttagtaccgacctgacgtac

SEQ ID NO: 10160 - DNA, 22 bp, synthetic construct
  misc_feature 1..22: note = Synthetic construct
  source 1..22: mol_type = other DNA
gttagtaccgacctgacgtacg

SEQ ID NO: 10161 - DNA, 22 bp, synthetic construct
  misc_feature 1..22: note = Synthetic construct
  source 1..22: mol_type = other DNA
ttagtaccgacctgacgtacgg

SEQ ID NO: 10162 - DNA, 22 bp, synthetic construct
  misc_feature 1..22: note = Synthetic construct
  source 1..22: mol_type = other DNA
tagtaccgacctgacgtacggc

SEQ ID NO: 10163 - DNA, 22 bp, synthetic construct
  misc_feature 1..22: note = Synthetic construct
  source 1..22: mol_type = other DNA
agtaccgacctgacgtacggct

SEQ ID NO: 10164 - DNA, 22 bp, synthetic construct
  misc_feature 1..22: note = Synthetic construct
  source 1..22: mol_type = other DNA
gtaccgacctgacgtacggctc

SEQ ID NO: 10165 - DNA, 22 bp, synthetic construct
  misc_feature 1..22: note = Synthetic construct
  source 1..22: mol_type = other DNA
taccgacctgacgtacggctct

SEQ ID NO: 10166 - DNA, 22 bp, synthetic construct
  misc_feature 1..22: note = Synthetic construct
  source 1..22: mol_type = other DNA
accgacctgacgtacggctctc

SEQ ID NO: 10167 - DNA, 22 bp, synthetic construct
  misc_feature 1..22: note = Synthetic construct
  source 1..22: mol_type = other DNA
ccgacctgacgtacggctctca

SEQ ID NO: 10168 - DNA, 22 bp, synthetic construct
  misc_feature 1..22: note = Synthetic construct
  source 1..22: mol_type = other DNA
cgacctgacgtacggctctcat

SEQ ID NO: 10169 - DNA, 22 bp, synthetic construct
  misc_feature 1..22: note = Synthetic construct
  source 1..22: mol_type = other DNA
gacctgacgtacggctctcata

SEQ ID NO: 10170 - DNA, 22 bp, synthetic construct
  misc_feature 1..22: note = Synthetic construct
  source 1..22: mol_type = other DNA
acctgacgtacggctctcatag

SEQ ID NO: 10171 - DNA, 22 bp, synthetic construct
  misc_feature 1..22: note = Synthetic construct
  source 1..22: mol_type = other DNA
cctgacgtacggctctcatagg

SEQ ID NO: 10172 - DNA, 22 bp, synthetic construct
  misc_feature 1..22: note = Synthetic construct
  source 1..22: mol_type = other DNA
ctgacgtacggctctcatagga

SEQ ID NO: 10173 - DNA, 22 bp, synthetic construct
  misc_feature 1..22: note = Synthetic construct
  source 1..22: mol_type = other DNA
tgacgtacggctctcataggaa

SEQ ID NO: 10174 - DNA, 22 bp, synthetic construct
  misc_feature 1..22: note = Synthetic construct
  source 1..22: mol_type = other DNA
gacgtacggctctcataggaag

SEQ ID NO: 10175 - DNA, 22 bp, synthetic construct
  misc_feature 1..22: note = Synthetic construct
  source 1..22: mol_type = other DNA
acgtacggctctcataggaaga

SEQ ID NO: 10176 - DNA, 22 bp, synthetic construct
  misc_feature 1..22: note = Synthetic construct
  source 1..22: mol_type = other DNA
cgtacggctctcataggaagaa

SEQ ID NO: 10177 - DNA, 22 bp, synthetic construct
  misc_feature 1..22: note = Synthetic construct
  source 1..22: mol_type = other DNA
gtacggctctcataggaagaaa

SEQ ID NO: 10178 - DNA, 22 bp, synthetic construct
  misc_feature 1..22: note = Synthetic construct
  source 1..22: mol_type = other DNA
tacggctctcataggaagaaac

SEQ ID NO: 10179 - DNA, 22 bp, synthetic construct
  misc_feature 1..22: note = Synthetic construct
  source 1..22: mol_type = other DNA
acggctctcataggaagaaact

SEQ ID NO: 10180 - DNA, 22 bp, synthetic construct
  misc_feature 1..22: note = Synthetic construct
  source 1..22: mol_type = other DNA
cggctctcataggaagaaactc

SEQ ID NO: 10181 - DNA, 22 bp, synthetic construct
  misc_feature 1..22: note = Synthetic construct
  source 1..22: mol_type = other DNA
ggctctcataggaagaaactct

SEQ ID NO: 10182 - DNA, 22 bp, synthetic construct
  misc_feature 1..22: note = Synthetic construct
  source 1..22: mol_type = other DNA
gctctcataggaagaaactctt

SEQ ID NO: 10183 - DNA, 22 bp, synthetic construct
  misc_feature 1..22: note = Synthetic construct
  source 1..22: mol_type = other DNA
ctctcataggaagaaactcttg

SEQ ID NO: 10184 - DNA, 22 bp, synthetic construct
  misc_feature 1..22: note = Synthetic construct
  source 1..22: mol_type = other DNA
tctcataggaagaaactcttga

SEQ ID NO: 10185 - DNA, 22 bp, synthetic construct
  misc_feature 1..22: note = Synthetic construct
  source 1..22: mol_type = other DNA
ctcataggaagaaactcttgaa

SEQ ID NO: 10186 - DNA, 22 bp, synthetic construct
  misc_feature 1..22: note = Synthetic construct
  source 1..22: mol_type = other DNA
tcataggaagaaactcttgaag

SEQ ID NO: 10187 - DNA, 22 bp, synthetic construct
  misc_feature 1..22: note = Synthetic construct
  source 1..22: mol_type = other DNA
cataggaagaaactcttgaagg

SEQ ID NO: 10188 - DNA, 22 bp, synthetic construct
  misc_feature 1..22: note = Synthetic construct
  source 1..22: mol_type = other DNA
ataggaagaaactcttgaaggt

SEQ ID NO: 10189 - DNA, 22 bp, synthetic construct
  misc_feature 1..22: note = Synthetic construct
  source 1..22: mol_type = other DNA
taggaagaaactcttgaaggtg

SEQ ID NO: 10190 - DNA, 22 bp, synthetic construct
  misc_feature 1..22: note = Synthetic construct
  source 1..22: mol_type = other DNA
aggaagaaactcttgaaggtga

SEQ ID NO: 10191 - DNA, 22 bp, synthetic construct
  misc_feature 1..22: note = Synthetic construct
  source 1..22: mol_type = other DNA
ggaagaaactcttgaaggtgaa

SEQ ID NO: 10192 - DNA, 22 bp, synthetic construct
  misc_feature 1..22: note = Synthetic construct
  source 1..22: mol_type = other DNA
gaagaaactcttgaaggtgaac

SEQ ID NO: 10193 - DNA, 22 bp, synthetic construct
  misc_feature 1..22: note = Synthetic construct
  source 1..22: mol_type = other DNA
aagaaactcttgaaggtgaacc

SEQ ID NO: 10194 - DNA, 22 bp, synthetic construct
  misc_feature 1..22: note = Synthetic construct
  source 1..22: mol_type = other DNA
agaaactcttgaaggtgaacct

SEQ ID NO: 10195 - DNA, 22 bp, synthetic construct
  misc_feature 1..22: note = Synthetic construct
  source 1..22: mol_type = other DNA
gaaactcttgaaggtgaacctt

SEQ ID NO: 10196 - DNA, 22 bp, synthetic construct
  misc_feature 1..22: note = Synthetic construct
  source 1..22: mol_type = other DNA
aaactcttgaaggtgaaccttc

SEQ ID NO: 10197 - DNA, 22 bp, synthetic construct
  misc_feature 1..22: note = Synthetic construct
  source 1..22: mol_type = other DNA
aactcttgaaggtgaaccttcg

SEQ ID NO: 10198 - DNA, 22 bp, synthetic construct
  misc_feature 1..22: note = Synthetic construct
  source 1..22: mol_type = other DNA
actcttgaaggtgaaccttcgt

SEQ ID NO: 10199 - DNA, 22 bp, synthetic construct
  misc_feature 1..22: note = Synthetic construct
  source 1..22: mol_type = other DNA
ctcttgaaggtgaaccttcgta

SEQ ID NO: 10200 - DNA, 22 bp, synthetic construct
  misc_feature 1..22: note = Synthetic construct
  source 1..22: mol_type = other DNA
tcttgaaggtgaaccttcgtaa

SEQ ID NO: 10201 - DNA, 22 bp, synthetic construct
  misc_feature 1..22: note = Synthetic construct
  source 1..22: mol_type = other DNA
cttgaaggtgaaccttcgtaag

SEQ ID NO: 10202 - DNA, 22 bp, synthetic construct
  misc_feature 1..22: note = Synthetic construct
  source 1..22: mol_type = other DNA
ttgaaggtgaaccttcgtaagc

SEQ ID NO: 10203 - DNA, 22 bp, synthetic construct
  misc_feature 1..22: note = Synthetic construct
  source 1..22: mol_type = other DNA
tgaaggtgaaccttcgtaagca

SEQ ID NO: 10204 - DNA, 22 bp, synthetic construct
  misc_feature 1..22: note = Synthetic construct
  source 1..22: mol_type = other DNA
gaaggtgaaccttcgtaagcat

SEQ ID NO: 10205 - DNA, 22 bp, synthetic construct
  misc_feature 1..22: note = Synthetic construct
  source 1..22: mol_type = other DNA
aaggtgaaccttcgtaagcatc

SEQ ID NO: 10206 - DNA, 22 bp, synthetic construct
  misc_feature 1..22: note = Synthetic construct
  source 1..22: mol_type = other DNA
aggtgaaccttcgtaagcatct

SEQ ID NO: 10207 - DNA, 22 bp, synthetic construct
  misc_feature 1..22: note = Synthetic construct
  source 1..22: mol_type = other DNA
ggtgaaccttcgtaagcatctc

SEQ ID NO: 10208 - DNA, 22 bp, synthetic construct
  misc_feature 1..22: note = Synthetic construct
  source 1..22: mol_type = other DNA
gtgaaccttcgtaagcatctca

SEQ ID NO: 10209 - DNA, 22 bp, synthetic construct
  misc_feature 1..22: note = Synthetic construct
  source 1..22: mol_type = other DNA
tgaaccttcgtaagcatctcat

SEQ ID NO: 10210 - DNA, 22 bp, synthetic construct
  misc_feature 1..22: note = Synthetic construct
  source 1..22: mol_type = other DNA
gaaccttcgtaagcatctcata

SEQ ID NO: 10211 - DNA, 22 bp, synthetic construct
  misc_feature 1..22: note = Synthetic construct
  source 1..22: mol_type = other DNA
aaccttcgtaagcatctcatat

SEQ ID NO: 10212 - DNA, 22 bp, synthetic construct
  misc_feature 1..22: note = Synthetic construct
  source 1..22: mol_type = other DNA
accttcgtaagcatctcatatg

SEQ ID NO: 10213 - DNA, 22 bp, synthetic construct
  misc_feature 1..22: note = Synthetic construct
  source 1..22: mol_type = other DNA
ccttcgtaagcatctcatatgc

SEQ ID NO: 10214 - DNA, 22 bp, synthetic construct
  misc_feature 1..22: note = Synthetic construct
  source 1..22: mol_type = other DNA
cttcgtaagcatctcatatgca

SEQ ID NO: 10215 - DNA, 22 bp, synthetic construct
  misc_feature 1..22: note = Synthetic construct
  source 1..22: mol_type = other DNA
ttcgtaagcatctcatatgcac

SEQ ID NO: 10216 - DNA, 22 bp, synthetic construct
  misc_feature 1..22: note = Synthetic construct
  source 1..22: mol_type = other DNA
tcgtaagcatctcatatgcacc

SEQ ID NO: 10217 - DNA, 22 bp, synthetic construct
  misc_feature 1..22: note = Synthetic construct
  source 1..22: mol_type = other DNA
cgtaagcatctcatatgcaccc

SEQ ID NO: 10218 - DNA, 22 bp, synthetic construct
  misc_feature 1..22: note = Synthetic construct
  source 1..22: mol_type = other DNA
gtaagcatctcatatgcaccct

SEQ ID NO: 10219 - DNA, 22 bp, synthetic construct
  misc_feature 1..22: note = Synthetic construct
  source 1..22: mol_type = other DNA
taagcatctcatatgcaccctg

SEQ ID NO: 10220 - DNA, 22 bp, synthetic construct
  misc_feature 1..22: note = Synthetic construct
  source 1..22: mol_type = other DNA
aagcatctcatatgcaccctgg

SEQ ID NO: 10221 - DNA, 22 bp, synthetic construct
  misc_feature 1..22: note = Synthetic construct
  source 1..22: mol_type = other DNA
agcatctcatatgcaccctgga

SEQ ID NO: 10222 - DNA, 22 bp, synthetic construct
  misc_feature 1..22: note = Synthetic construct
  source 1..22: mol_type = other DNA
gcatctcatatgcaccctggat

SEQ ID NO: 10223 - DNA, 22 bp, synthetic construct
  misc_feature 1..22: note = Synthetic construct
  source 1..22: mol_type = other DNA
catctcatatgcaccctggata

SEQ ID NO: 10224 - DNA, 22 bp, synthetic construct
  misc_feature 1..22: note = Synthetic construct
  source 1..22: mol_type = other DNA
atctcatatgcaccctggatat

SEQ ID NO: 10225 - DNA, 22 bp, synthetic construct
  misc_feature 1..22: note = Synthetic construct
  source 1..22: mol_type = other DNA
tctcatatgcaccctggatatc

SEQ ID NO: 10226 - DNA, 22 bp, synthetic construct
  misc_feature 1..22: note = Synthetic construct
  source 1..22: mol_type = other DNA
ctcatatgcaccctggatatca

SEQ ID NO: 10227 - DNA, 22 bp, synthetic construct
  misc_feature 1..22: note = Synthetic construct
  source 1..22: mol_type = other DNA
tcatatgcaccctggatatcac

SEQ ID NO: 10228 - DNA, 22 bp, synthetic construct
  misc_feature 1..22: note = Synthetic construct
  source 1..22: mol_type = other DNA
catatgcaccctggatatcact

SEQ ID NO: 10229 - DNA, 22 bp, synthetic construct
  misc_feature 1..22: note = Synthetic construct
  source 1..22: mol_type = other DNA
atatgcaccctggatatcactc

SEQ ID NO: 10230 - DNA, 22 bp, synthetic construct
  misc_feature 1..22: note = Synthetic construct
  source 1..22: mol_type = other DNA
tatgcaccctggatatcactca

SEQ ID NO: 10231 - DNA, 22 bp, synthetic construct
  misc_feature 1..22: note = Synthetic construct
  source 1..22: mol_type = other DNA
atgcaccctggatatcactcat

SEQ ID NO: 10232 - DNA, 22 bp, synthetic construct
  misc_feature 1..22: note = Synthetic construct
  source 1..22: mol_type = other DNA
tgcaccctggatatcactcatt

SEQ ID NO: 10233 - DNA, 22 bp, synthetic construct
  misc_feature 1..22: note = Synthetic construct
  source 1..22: mol_type = other DNA
gcaccctggatatcactcatta

SEQ ID NO: 10234 - DNA, 22 bp, synthetic construct
  misc_feature 1..22: note = Synthetic construct
  source 1..22: mol_type = other DNA
caccctggatatcactcattag

SEQ ID NO: 10235 - DNA, 22 bp, synthetic construct
  misc_feature 1..22: note = Synthetic construct
  source 1..22: mol_type = other DNA
accctggatatcactcattagt

SEQ ID NO: 10236 - DNA, 22 bp, synthetic construct
  misc_feature 1..22: note = Synthetic construct
  source 1..22: mol_type = other DNA
ccctggatatcactcattagtg

SEQ ID NO: 10237 - DNA, 22 bp, synthetic construct
  misc_feature 1..22: note = Synthetic construct
  source 1..22: mol_type = other DNA
cctggatatcactcattagtgg

SEQ ID NO: 10238 - DNA, 22 bp, synthetic construct
  misc_feature 1..22: note = Synthetic construct
  source 1..22: mol_type = other DNA
ctggatatcactcattagtggt

SEQ ID NO: 10239 - DNA, 22 bp, synthetic construct
  misc_feature 1..22: note = Synthetic construct
  source 1..22: mol_type = other DNA
tggatatcactcattagtggta

SEQ ID NO: 10240 - DNA, 22 bp, synthetic construct
  misc_feature 1..22: note = Synthetic construct
  source 1..22: mol_type = other DNA
ggatatcactcattagtggtaa

SEQ ID NO: 10241 - DNA, 22 bp, synthetic construct
  misc_feature 1..22: note = Synthetic construct
  source 1..22: mol_type = other DNA
gatatcactcattagtggtaac

SEQ ID NO: 10242 - DNA, 22 bp, synthetic construct
  misc_feature 1..22: note = Synthetic construct
  source 1..22: mol_type = other DNA
atatcactcattagtggtaacc

SEQ ID NO: 10243 - DNA, 22 bp, synthetic construct
  misc_feature 1..22: note = Synthetic construct
  source 1..22: mol_type = other DNA
tatcactcattagtggtaacca

SEQ ID NO: 10244 - DNA, 22 bp, synthetic construct
  misc_feature 1..22: note = Synthetic construct
  source 1..22: mol_type = other DNA
atcactcattagtggtaaccaa

SEQ ID NO: 10245 - DNA, 22 bp, synthetic construct
  misc_feature 1..22: note = Synthetic construct
  source 1..22: mol_type = other DNA
tcactcattagtggtaaccaac

SEQ ID NO: 10246 - DNA, 22 bp, synthetic construct
  misc_feature 1..22: note = Synthetic construct
  source 1..22: mol_type = other DNA
cactcattagtggtaaccaacc

SEQ ID NO: 10247 - DNA, 22 bp, synthetic construct
  misc_feature 1..22: note = Synthetic construct
  source 1..22: mol_type = other DNA
actcattagtggtaaccaaccg

SEQ ID NO: 10248 - DNA, 22 bp, synthetic construct
  misc_feature 1..22: note = Synthetic construct
  source 1..22: mol_type = other DNA
ctcattagtggtaaccaaccga

SEQ ID NO: 10249 - DNA, 22 bp, synthetic construct
  misc_feature 1..22: note = Synthetic construct
  source 1..22: mol_type = other DNA
tcattagtggtaaccaaccgaa

SEQ ID NO: 10250 - DNA, 22 bp, synthetic construct
  misc_feature 1..22: note = Synthetic construct
  source 1..22: mol_type = other DNA
cattagtggtaaccaaccgaac

SEQ ID NO: 10251 - DNA, 22 bp, synthetic construct
  misc_feature 1..22: note = Synthetic construct
  source 1..22: mol_type = other DNA
attagtggtaaccaaccgaact

SEQ ID NO: 10252 - DNA, 22 bp, synthetic construct
  misc_feature 1..22: note = Synthetic construct
  source 1..22: mol_type = other DNA
ttagtggtaaccaaccgaactg

SEQ ID NO: 10253 - DNA, 22 bp, synthetic construct
  misc_feature 1..22: note = Synthetic construct
  source 1..22: mol_type = other DNA
tagtggtaaccaaccgaactgc

SEQ ID NO: 10254 - DNA, 22 bp, synthetic construct
  misc_feature 1..22: note = Synthetic construct
  source 1..22: mol_type = other DNA
agtggtaaccaaccgaactgca

SEQ ID NO: 10255 - DNA, 22 bp, synthetic construct
  misc_feature 1..22: note = Synthetic construct
  source 1..22: mol_type = other DNA
gtggtaaccaaccgaactgcaa

SEQ ID NO: 10256 - DNA, 22 bp, synthetic construct
  misc_feature 1..22: note = Synthetic construct
  source 1..22: mol_type = other DNA
tggtaaccaaccgaactgcaac

SEQ ID NO: 10257 - DNA, 22 bp, synthetic construct
  misc_feature 1..22: note = Synthetic construct
  source 1..22: mol_type = other DNA
ggtaaccaaccgaactgcaact

SEQ ID NO: 10258 - DNA, 22 bp, synthetic construct
  misc_feature 1..22: note = Synthetic construct
  source 1..22: mol_type = other DNA
gtaaccaaccgaactgcaactc

SEQ ID NO: 10259 - DNA, 22 bp, synthetic construct
  misc_feature 1..22: note = Synthetic construct
  source 1..22: mol_type = other DNA
taaccaaccgaactgcaactcc

SEQ ID NO: 10260 - DNA, 22 bp, synthetic construct
  misc_feature 1..22: note = Synthetic construct
  source 1..22: mol_type = other DNA
aaccaaccgaactgcaactcca

SEQ ID NO: 10261 - DNA, 22 bp, synthetic construct
  misc_feature 1..22: note = Synthetic construct
  source 1..22: mol_type = other DNA
accaaccgaactgcaactccaa

SEQ ID NO: 10262 - DNA, 22 bp, synthetic construct
  misc_feature 1..22: note = Synthetic construct
  source 1..22: mol_type = other DNA
ccaaccgaactgcaactccaac

SEQ ID NO: 10263 - DNA, 22 bp, synthetic construct
  misc_feature 1..22: note = Synthetic construct
  source 1..22: mol_type = other DNA
caaccgaactgcaactccaacc

SEQ ID NO: 10264 - DNA, 22 bp, synthetic construct
  misc_feature 1..22: note = Synthetic construct
  source 1..22: mol_type = other DNA
aaccgaactgcaactccaacca

SEQ ID NO: 10265 - DNA, 22 bp, synthetic construct
  misc_feature 1..22: note = Synthetic construct
  source 1..22: mol_type = other DNA
accgaactgcaactccaaccac

SEQ ID NO: 10266 - DNA, 22 bp, synthetic construct
  misc_feature 1..22: note = Synthetic construct
  source 1..22: mol_type = other DNA
ccgaactgcaactccaaccacc

SEQ ID NO: 10267 - DNA, 22 bp, synthetic construct
  misc_feature 1..22: note = Synthetic construct
  source 1..22: mol_type = other DNA
cgaactgcaactccaaccacct

SEQ ID NO: 10268 - DNA, 22 bp, synthetic construct
  misc_feature 1..22: note = Synthetic construct
  source 1..22: mol_type = other DNA
gaactgcaactccaaccacctg

SEQ ID NO: 10269 - DNA, 22 bp, synthetic construct
  misc_feature 1..22: note = Synthetic construct
  source 1..22: mol_type = other DNA
aactgcaactccaaccacctgc

SEQ ID NO: 10270 - DNA, 22 bp, synthetic construct
  misc_feature 1..22: note = Synthetic construct
  source 1..22: mol_type = other DNA
actgcaactccaaccacctgcc

SEQ ID NO: 10271 - DNA, 22 bp, synthetic construct
  misc_feature 1..22: note = Synthetic construct
  source 1..22: mol_type = other DNA
ctgcaactccaaccacctgccg

SEQ ID NO: 10272 - DNA, 22 bp, synthetic construct
  misc_feature 1..22: note = Synthetic construct
  source 1..22: mol_type = other DNA
tgcaactccaaccacctgccgg

SEQ ID NO: 10273 - DNA, 22 bp, synthetic construct
  misc_feature 1..22: note = Synthetic construct
  source 1..22: mol_type = other DNA
gcaactccaaccacctgccggc

SEQ ID NO: 10274 - DNA, 22 bp, synthetic construct
  misc_feature 1..22: note = Synthetic construct
  source 1..22: mol_type = other DNA
caactccaaccacctgccggcc

SEQ ID NO: 10275 - DNA, 22 bp, synthetic construct
  misc_feature 1..22: note = Synthetic construct
  source 1..22: mol_type = other DNA
aactccaaccacctgccggcca

SEQ ID NO: 10276 - DNA, 22 bp, synthetic construct
  misc_feature 1..22: note = Synthetic construct
  source 1..22: mol_type = other DNA
actccaaccacctgccggccac

SEQ ID NO: 10277 - DNA, 22 bp, synthetic construct
  misc_feature 1..22: note = Synthetic construct
  source 1..22: mol_type = other DNA
ctccaaccacctgccggccacg

SEQ ID NO: 10278 - DNA, 22 bp, synthetic construct
  misc_feature 1..22: note = Synthetic construct
  source 1..22: mol_type = other DNA
tccaaccacctgccggccacgt

SEQ ID NO: 10279 - DNA, 22 bp, synthetic construct
  misc_feature 1..22: note = Synthetic construct
  source 1..22: mol_type = other DNA
ccaaccacctgccggccacgtg

SEQ ID NO: 10280 - DNA, 22 bp, synthetic construct
  misc_feature 1..22: note = Synthetic construct
  source 1..22: mol_type = other DNA
caaccacctgccggccacgtgt

SEQ ID NO: 10281 - DNA, 22 bp, synthetic construct
  misc_feature 1..22: note = Synthetic construct
  source 1..22: mol_type = other DNA
aaccacctgccggccacgtgtt

SEQ ID NO: 10282 - DNA, 22 bp, synthetic construct
  misc_feature 1..22: note = Synthetic construct
  source 1..22: mol_type = other DNA
accacctgccggccacgtgttt

SEQ ID NO: 10283 - DNA, 22 bp, synthetic construct
  misc_feature 1..22: note = Synthetic construct
  source 1..22: mol_type = other DNA
ccacctgccggccacgtgtttt

SEQ ID NO: 10284 - DNA, 22 bp, synthetic construct
  misc_feature 1..22: note = Synthetic construct
  source 1..22: mol_type = other DNA
cacctgccggccacgtgttttg

SEQ ID NO: 10285 - DNA, 22 bp, synthetic construct
  misc_feature 1..22: note = Synthetic construct
  source 1..22: mol_type = other DNA
acctgccggccacgtgttttga

SEQ ID NO: 10286 - DNA, 22 bp, synthetic construct
  misc_feature 1..22: note = Synthetic construct
  source 1..22: mol_type = other DNA
cctgccggccacgtgttttgat

SEQ ID NO: 10287 - DNA, 22 bp, synthetic construct
  misc_feature 1..22: note = Synthetic construct
  source 1..22: mol_type = other DNA
ctgccggccacgtgttttgatc

SEQ ID NO: 10288 - DNA, 22 bp, synthetic construct
  misc_feature 1..22: note = Synthetic construct
  source 1..22: mol_type = other DNA
tgccggccacgtgttttgatcg

SEQ ID NO: 10289 - DNA, 22 bp, synthetic construct
  misc_feature 1..22: note = Synthetic construct
  source 1..22: mol_type = other DNA
gccggccacgtgttttgatcga

SEQ ID NO: 10290 - DNA, 22 bp, synthetic construct
  misc_feature 1..22: note = Synthetic construct
  source 1..22: mol_type = other DNA
ccggccacgtgttttgatcgaa

SEQ ID NO: 10291 - DNA, 22 bp, synthetic construct
  misc_feature 1..22: note = Synthetic construct
  source 1..22: mol_type = other DNA
cggccacgtgttttgatcgaaa

SEQ ID NO: 10292 - DNA, 22 bp, synthetic construct
  misc_feature 1..22: note = Synthetic construct
  source 1..22: mol_type = other DNA
ggccacgtgttttgatcgaaac

SEQ ID NO: 10293 - DNA, 22 bp, synthetic construct
  misc_feature 1..22: note = Synthetic construct
  source 1..22: mol_type = other DNA
gccacgtgttttgatcgaaact

SEQ ID NO: 10294 - DNA, 22 bp, synthetic construct
  misc_feature 1..22: note = Synthetic construct
  source 1..22: mol_type = other DNA
ccacgtgttttgatcgaaactt

SEQ ID NO: 10295 - DNA, 22 bp, synthetic construct
  misc_feature 1..22: note = Synthetic construct
  source 1..22: mol_type = other DNA
cacgtgttttgatcgaaacttt

SEQ ID NO: 10296 - DNA, 22 bp, synthetic construct
  misc_feature 1..22: note = Synthetic construct
  source 1..22: mol_type = other DNA
acgtgttttgatcgaaactttc

SEQ ID NO: 10297 - DNA, 22 bp, synthetic construct
  misc_feature 1..22: note = Synthetic construct
  source 1..22: mol_type = other DNA
cgtgttttgatcgaaactttcg

SEQ ID NO: 10298 - DNA, 22 bp, synthetic construct
  misc_feature 1..22: note = Synthetic construct
  source 1..22: mol_type = other DNA
gtgttttgatcgaaactttcga

SEQ ID NO: 10299 - DNA, 22 bp, synthetic construct
  misc_feature 1..22: note = Synthetic construct
  source 1..22: mol_type = other DNA
tgttttgatcgaaactttcgat

SEQ ID NO: 10300 - DNA, 22 bp, synthetic construct
  misc_feature 1..22: note = Synthetic construct
  source 1..22: mol_type = other DNA
gttttgatcgaaactttcgatc

SEQ ID NO: 10301 - DNA, 22 bp, synthetic construct
  misc_feature 1..22: note = Synthetic construct
  source 1..22: mol_type = other DNA
ttttgatcgaaactttcgatct

SEQ ID NO: 10302 - DNA, 22 bp, synthetic construct
  misc_feature 1..22: note = Synthetic construct
  source 1..22: mol_type = other DNA
tttgatcgaaactttcgatctt

SEQ ID NO: 10303 - DNA, 22 bp, synthetic construct
  misc_feature 1..22: note = Synthetic construct
  source 1..22: mol_type = other DNA
ttgatcgaaactttcgatcttc

SEQ ID NO: 10304 - DNA, 22 bp, synthetic construct
  misc_feature 1..22: note = Synthetic construct
  source 1..22: mol_type = other DNA
tgatcgaaactttcgatcttcg

SEQ ID NO: 10305 - DNA, 22 bp, synthetic construct
  misc_feature 1..22: note = Synthetic construct
  source 1..22: mol_type = other DNA
gatcgaaactttcgatcttcgt

SEQ ID NO: 10306 - DNA, 22 bp, synthetic construct
  misc_feature 1..22: note = Synthetic construct
  source 1..22: mol_type = other DNA
atcgaaactttcgatcttcgtt

SEQ ID NO: 10307 - DNA, 22 bp, synthetic construct
  misc_feature 1..22: note = Synthetic construct
  source 1..22: mol_type = other DNA
tcgaaactttcgatcttcgttt

SEQ ID NO: 10308 - DNA, 22 bp, synthetic construct
  misc_feature 1..22: note = Synthetic construct
  source 1..22: mol_type = other DNA
cgaaactttcgatcttcgttta

SEQ ID NO: 10309 - DNA, 22 bp, synthetic construct
  misc_feature 1..22: note = Synthetic construct
  source 1..22: mol_type = other DNA
gaaactttcgatcttcgtttag

SEQ ID NO: 10310 - DNA, 22 bp, synthetic construct
  misc_feature 1..22: note = Synthetic construct
  source 1..22: mol_type = other DNA
aaactttcgatcttcgtttagg

SEQ ID NO: 10311 - DNA, 22 bp, synthetic construct
  misc_feature 1..22: note = Synthetic construct
  source 1..22: mol_type = other DNA
aactttcgatcttcgtttaggg

SEQ ID NO: 10312 - DNA, 22 bp, synthetic construct
  misc_feature 1..22: note = Synthetic construct
  source 1..22: mol_type = other DNA
actttcgatcttcgtttagggc

SEQ ID NO: 10313 - DNA, 22 bp, synthetic construct
  misc_feature 1..22: note = Synthetic construct
  source 1..22: mol_type = other DNA
ctttcgatcttcgtttagggca

SEQ ID NO: 10314 - DNA, 22 bp, synthetic construct
  misc_feature 1..22: note = Synthetic construct
  source 1..22: mol_type = other DNA
tttcgatcttcgtttagggcaa

SEQ ID NO: 10315 - DNA, 22 bp, synthetic construct
  misc_feature 1..22: note = Synthetic construct
  source 1..22: mol_type = other DNA
ttcgatcttcgtttagggcaag

SEQ ID NO: 10316 - DNA, 22 bp, synthetic construct
  misc_feature 1..22: note = Synthetic construct
  source 1..22: mol_type = other DNA
tcgatcttcgtttagggcaagg

SEQ ID NO: 10317 - DNA, 22 bp, synthetic construct
  misc_feature 1..22: note = Synthetic construct
  source 1..22: mol_type = other DNA
cgatcttcgtttagggcaaggt

SEQ ID NO: 10318 - DNA, 22 bp, synthetic construct
  misc_feature 1..22: note = Synthetic construct
  source 1..22: mol_type = other DNA
gatcttcgtttagggcaaggta

SEQ ID NO: 10319 - DNA, 22 bp, synthetic construct
  misc_feature 1..22: note = Synthetic construct
  source 1..22: mol_type = other DNA
atcttcgtttagggcaaggtag

SEQ ID NO: 10320 - DNA, 22 bp, synthetic construct
  misc_feature 1..22: note = Synthetic construct
  source 1..22: mol_type = other DNA
tcttcgtttagggcaaggtagc

SEQ ID NO: 10321 - DNA, 22 bp, synthetic construct
  misc_feature 1..22: note = Synthetic construct
  source 1..22: mol_type = other DNA
cttcgtttagggcaaggtagcg

SEQ ID NO: 10322 - DNA, 22 bp, synthetic construct
  misc_feature 1..22: note = Synthetic construct
  source 1..22: mol_type = other DNA
ttcgtttagggcaaggtagcgg

SEQ ID NO: 10323 - DNA, 22 bp, synthetic construct
  misc_feature 1..22: note = Synthetic construct
  source 1..22: mol_type = other DNA
tcgtttagggcaaggtagcgga

SEQ ID NO: 10324 - DNA, 22 bp, synthetic construct
  misc_feature 1..22: note = Synthetic construct
  source 1..22: mol_type = other DNA
cgtttagggcaaggtagcggag

SEQ ID NO: 10325 - DNA, 22 bp, synthetic construct
  misc_feature 1..22: note = Synthetic construct
  source 1..22: mol_type = other DNA
gtttagggcaaggtagcggagc

SEQ ID NO: 10326 - DNA, 22 bp, synthetic construct
  misc_feature 1..22: note = Synthetic construct
  source 1..22: mol_type = other DNA
tttagggcaaggtagcggagcg

SEQ ID NO: 10327 - DNA, 22 bp, synthetic construct
  misc_feature 1..22: note = Synthetic construct
  source 1..22: mol_type = other DNA
ttagggcaaggtagcggagcgc

SEQ ID NO: 10328 - DNA, 22 bp, synthetic construct
  misc_feature 1..22: note = Synthetic construct
  source 1..22: mol_type = other DNA
tagggcaaggtagcggagcgcc

SEQ ID NO: 10329 - DNA, 22 bp, synthetic construct
  misc_feature 1..22: note = Synthetic construct
  source 1..22: mol_type = other DNA
agggcaaggtagcggagcgcct

SEQ ID NO: 10330 - DNA, 22 bp, synthetic construct
  misc_feature 1..22: note = Synthetic construct
  source 1..22: mol_type = other DNA
gggcaaggtagcggagcgcctg

SEQ ID NO: 10331 - DNA, 22 bp, synthetic construct
  misc_feature 1..22: note = Synthetic construct
  source 1..22: mol_type = other DNA
ggcaaggtagcggagcgcctgg

SEQ ID NO: 10332 - DNA, 22 bp, synthetic construct
  misc_feature 1..22: note = Synthetic construct
  source 1..22: mol_type = other DNA
gcaaggtagcggagcgcctggc

SEQ ID NO: 10333 - DNA, 22 bp, synthetic construct
  misc_feature 1..22: note = Synthetic construct
  source 1..22: mol_type = other DNA
caaggtagcggagcgcctggcg

SEQ ID NO: 10334 - DNA, 22 bp, synthetic construct
  misc_feature 1..22: note = Synthetic construct
  source 1..22: mol_type = other DNA
aaggtagcggagcgcctggcgc

SEQ ID NO: 10335 - DNA, 22 bp, synthetic construct
  misc_feature 1..22: note = Synthetic construct
  source 1..22: mol_type = other DNA
aggtagcggagcgcctggcgcc

SEQ ID NO: 10336 - DNA, 22 bp, synthetic construct
  misc_feature 1..22: note = Synthetic construct
  source 1..22: mol_type = other DNA
ggtagcggagcgcctggcgcca

SEQ ID NO: 10337 - DNA, 22 bp, synthetic construct
  misc_feature 1..22: note = Synthetic construct
  source 1..22: mol_type = other DNA
gtagcggagcgcctggcgccaa

SEQ ID NO: 10338 - DNA, 22 bp, synthetic construct
  misc_feature 1..22: note = Synthetic construct
  source 1..22: mol_type = other DNA
tagcggagcgcctggcgccaat

SEQ ID NO: 10339 - DNA, 22 bp, synthetic construct
  misc_feature 1..22: note = Synthetic construct
  source 1..22: mol_type = other DNA
agcggagcgcctggcgccaatt

SEQ ID NO: 10340 - DNA, 22 bp, synthetic construct
  misc_feature 1..22: note = Synthetic construct
  source 1..22: mol_type = other DNA
gcggagcgcctggcgccaatta

SEQ ID NO: 10341 - DNA, 22 bp, synthetic construct
  misc_feature 1..22: note = Synthetic construct
  source 1..22: mol_type = other DNA
cggagcgcctggcgccaattac

SEQ ID NO: 10342 - DNA, 22 bp, synthetic construct
  misc_feature 1..22: note = Synthetic construct
  source 1..22: mol_type = other DNA
ggagcgcctggcgccaattacc

SEQ ID NO: 10343 - DNA, 22 bp, synthetic construct
  misc_feature 1..22: note = Synthetic construct
  source 1..22: mol_type = other DNA
gagcgcctggcgccaattaccg

SEQ ID NO: 10344 - DNA, 22 bp, synthetic construct
  misc_feature 1..22: note = Synthetic construct
  source 1..22: mol_type = other DNA
agcgcctggcgccaattaccgc

SEQ ID NO: 10345 - DNA, 22 bp, synthetic construct
  misc_feature 1..22: note = Synthetic construct
  source 1..22: mol_type = other DNA
gcgcctggcgccaattaccgcg

SEQ ID NO: 10346 - DNA, 22 bp, synthetic construct
  misc_feature 1..22: note = Synthetic construct
  source 1..22: mol_type = other DNA
cgcctggcgccaattaccgcga

SEQ ID NO: 10347 - DNA, 22 bp, synthetic construct
  misc_feature 1..22: note = Synthetic construct
  source 1..22: mol_type = other DNA
gcctggcgccaattaccgcgac

SEQ ID NO: 10348 - DNA, 22 bp, synthetic construct
  misc_feature 1..22: note = Synthetic construct
  source 1..22: mol_type = other DNA
cctggcgccaattaccgcgacg

SEQ ID NO: 10349 - DNA, 22 bp, synthetic construct
  misc_feature 1..22: note = Synthetic construct
  source 1..22: mol_type = other DNA
ctggcgccaattaccgcgacga

SEQ ID NO: 10350 - DNA, 22 bp, synthetic construct
  misc_feature 1..22: note = Synthetic construct
  source 1..22: mol_type = other DNA
tggcgccaattaccgcgacgag

SEQ ID NO: 10351 - DNA, 22 bp, synthetic construct
  misc_feature 1..22: note = Synthetic construct
  source 1..22: mol_type = other DNA
ggcgccaattaccgcgacgagc

SEQ ID NO: 10352 - DNA, 22 bp, synthetic construct
  misc_feature 1..22: note = Synthetic construct
  source 1..22: mol_type = other DNA
gcgccaattaccgcgacgagcg

SEQ ID NO: 10353 - DNA, 22 bp, synthetic construct
  misc_feature 1..22: note = Synthetic construct
  source 1..22: mol_type = other DNA
cgccaattaccgcgacgagcgg

SEQ ID NO: 10354 - DNA, 22 bp, synthetic construct
  misc_feature 1..22: note = Synthetic construct
  source 1..22: mol_type = other DNA
gccaattaccgcgacgagcggc

SEQ ID NO: 10355 - DNA, 22 bp, synthetic construct
  misc_feature 1..22: note = Synthetic construct
  source 1..22: mol_type = other DNA
ccaattaccgcgacgagcggca

SEQ ID NO: 10356 - DNA, 22 bp, synthetic construct
  misc_feature 1..22: note = Synthetic construct
  source 1..22: mol_type = other DNA
caattaccgcgacgagcggcag

SEQ ID NO: 10357 - DNA, 22 bp, synthetic construct
  misc_feature 1..22: note = Synthetic construct
  source 1..22: mol_type = other DNA
aattaccgcgacgagcggcagt

SEQ ID NO: 10358 - DNA, 22 bp, synthetic construct
  misc_feature 1..22: note = Synthetic construct
  source 1..22: mol_type = other DNA
attaccgcgacgagcggcagtg

SEQ ID NO: 10359 - DNA, 22 bp, synthetic construct
  misc_feature 1..22: note = Synthetic construct
  source 1..22: mol_type = other DNA
ttaccgcgacgagcggcagtgt

SEQ ID NO: 10360 - DNA, 22 bp, synthetic construct
  misc_feature 1..22: note = Synthetic construct
  source 1..22: mol_type = other DNA
taccgcgacgagcggcagtgta

SEQ ID NO: 10361 - DNA, 22 bp, synthetic construct
  misc_feature 1..22: note = Synthetic construct
  source 1..22: mol_type = other DNA
accgcgacgagcggcagtgtac

SEQ ID NO: 10362 - DNA, 22 bp, synthetic construct
  misc_feature 1..22: note = Synthetic construct
  source 1..22: mol_type = other DNA
ccgcgacgagcggcagtgtacg

SEQ ID NO: 10363 - DNA, 22 bp, synthetic construct
  misc_feature 1..22: note = Synthetic construct
  source 1..22: mol_type = other DNA
cgcgacgagcggcagtgtacgc

SEQ ID NO: 10364 - DNA, 22 bp, synthetic construct
  misc_feature 1..22: note = Synthetic construct
  source 1..22: mol_type = other DNA
gcgacgagcggcagtgtacgcc

SEQ ID NO: 10365 - DNA, 22 bp, synthetic construct
  misc_feature 1..22: note = Synthetic construct
  source 1..22: mol_type = other DNA
cgacgagcggcagtgtacgcct

SEQ ID NO: 10366 - DNA, 22 bp, synthetic construct
  misc_feature 1..22: note = Synthetic construct
  source 1..22: mol_type = other DNA
gacgagcggcagtgtacgcctt

SEQ ID NO: 10367 - DNA, 22 bp, synthetic construct
  misc_feature 1..22: note = Synthetic construct
  source 1..22: mol_type = other DNA
acgagcggcagtgtacgccttc

SEQ ID NO: 10368 - DNA, 22 bp, synthetic construct
  misc_feature 1..22: note = Synthetic construct
  source 1..22: mol_type = other DNA
cgagcggcagtgtacgccttca

SEQ ID NO: 10369 - DNA, 22 bp, synthetic construct
  misc_feature 1..22: note = Synthetic construct
  source 1..22: mol_type = other DNA
gagcggcagtgtacgccttcac

SEQ ID NO: 10370 - DNA, 22 bp, synthetic construct
  misc_feature 1..22: note = Synthetic construct
  source 1..22: mol_type = other DNA
agcggcagtgtacgccttcacg

SEQ ID NO: 10371 - DNA, 22 bp, synthetic construct
  misc_feature 1..22: note = Synthetic construct
  source 1..22: mol_type = other DNA
gcggcagtgtacgccttcacga

SEQ ID NO: 10372 - DNA, 22 bp, synthetic construct
  misc_feature 1..22: note = Synthetic construct
  source 1..22: mol_type = other DNA
cggcagtgtacgccttcacgag

SEQ ID NO: 10373 - DNA, 22 bp, synthetic construct
  misc_feature 1..22: note = Synthetic construct
  source 1..22: mol_type = other DNA
ggcagtgtacgccttcacgagc

SEQ ID NO: 10374 - DNA, 22 bp, synthetic construct
  misc_feature 1..22: note = Synthetic construct
  source 1..22: mol_type = other DNA
gcagtgtacgccttcacgagcg

SEQ ID NO: 10375 - DNA, 22 bp, synthetic construct
  misc_feature 1..22: note = Synthetic construct
  source 1..22: mol_type = other DNA
cagtgtacgccttcacgagcgc

SEQ ID NO: 10376 - DNA, 22 bp, synthetic construct
  misc_feature 1..22: note = Synthetic construct
  source 1..22: mol_type = other DNA
agtgtacgccttcacgagcgca

SEQ ID NO: 10377 - DNA, 22 bp, synthetic construct
  misc_feature 1..22: note = Synthetic construct
  source 1..22: mol_type = other DNA
gtgtacgccttcacgagcgcaa

SEQ ID NO: 10378 - DNA, 22 bp, synthetic construct
  misc_feature 1..22: note = Synthetic construct
  source 1..22: mol_type = other DNA
tgtacgccttcacgagcgcaat

SEQ ID NO: 10379 - DNA, 22 bp, synthetic construct
  misc_feature 1..22: note = Synthetic construct
  source 1..22: mol_type = other DNA
gtacgccttcacgagcgcaatg

SEQ ID NO: 10380 - DNA, 22 bp, synthetic construct
  misc_feature 1..22: note = Synthetic construct
  source 1..22: mol_type = other DNA
tacgccttcacgagcgcaatgg

SEQ ID NO: 10381 - DNA, 22 bp, synthetic construct
  misc_feature 1..22: note = Synthetic construct
  source 1..22: mol_type = other DNA
acgccttcacgagcgcaatggt

SEQ ID NO: 10382 - DNA, 22 bp, synthetic construct
  misc_feature 1..22: note = Synthetic construct
  source 1..22: mol_type = other DNA
cgccttcacgagcgcaatggtt

SEQ ID NO: 10383 - DNA, 22 bp, synthetic construct
  misc_feature 1..22: note = Synthetic construct
  source 1..22: mol_type = other DNA
gccttcacgagcgcaatggttt

SEQ ID NO: 10384 - DNA, 22 bp, synthetic construct
  misc_feature 1..22: note = Synthetic construct
  source 1..22: mol_type = other DNA
ccttcacgagcgcaatggtttg

SEQ ID NO: 10385 - DNA, 22 bp, synthetic construct
  misc_feature 1..22: note = Synthetic construct
  source 1..22: mol_type = other DNA
cttcacgagcgcaatggtttgc

SEQ ID NO: 10386 - DNA, 22 bp, synthetic construct
  misc_feature 1..22: note = Synthetic construct
  source 1..22: mol_type = other DNA
ttcacgagcgcaatggtttgcg

SEQ ID NO: 10387 - DNA, 22 bp, synthetic construct
  misc_feature 1..22: note = Synthetic construct
  source 1..22: mol_type = other DNA
tcacgagcgcaatggtttgcgt

SEQ ID NO: 10388 - DNA, 22 bp, synthetic construct
  misc_feature 1..22: note = Synthetic construct
  source 1..22: mol_type = other DNA
cacgagcgcaatggtttgcgtc

SEQ ID NO: 10389 - DNA, 22 bp, synthetic construct
  misc_feature 1..22: note = Synthetic construct
  source 1..22: mol_type = other DNA
acgagcgcaatggtttgcgtcg

SEQ ID NO: 10390 - DNA, 22 bp, synthetic construct
  misc_feature 1..22: note = Synthetic construct
  source 1..22: mol_type = other DNA
cgagcgcaatggtttgcgtcgc

SEQ ID NO: 10391 - DNA, 22 bp, synthetic construct
  misc_feature 1..22: note = Synthetic construct
  source 1..22: mol_type = other DNA
gagcgcaatggtttgcgtcgcg

SEQ ID NO: 10392 - DNA, 22 bp, synthetic construct
  misc_feature 1..22: note = Synthetic construct
  source 1..22: mol_type = other DNA
agcgcaatggtttgcgtcgcga

SEQ ID NO: 10393 - DNA, 22 bp, synthetic construct
  misc_feature 1..22: note = Synthetic construct
  source 1..22: mol_type = other DNA
gcgcaatggtttgcgtcgcgag

SEQ ID NO: 10394 - DNA, 22 bp, synthetic construct
  misc_feature 1..22: note = Synthetic construct
  source 1..22: mol_type = other DNA
cgcaatggtttgcgtcgcgagt

SEQ ID NO: 10395 - DNA, 22 bp, synthetic construct
  misc_feature 1..22: note = Synthetic construct
  source 1..22: mol_type = other DNA
gcaatggtttgcgtcgcgagtt

SEQ ID NO: 10396 - DNA, 22 bp, synthetic construct
  misc_feature 1..22: note = Synthetic construct
  source 1..22: mol_type = other DNA
caatggtttgcgtcgcgagttg

SEQ ID NO: 10397 - DNA, 22 bp, synthetic construct
  misc_feature 1..22: note = Synthetic construct
  source 1..22: mol_type = other DNA
aatggtttgcgtcgcgagttgt

SEQ ID NO: 10398 - DNA, 22 bp, synthetic construct
  misc_feature 1..22: note = Synthetic construct
  source 1..22: mol_type = other DNA
atggtttgcgtcgcgagttgtg

SEQ ID NO: 10399 - DNA, 22 bp, synthetic construct
  misc_feature 1..22: note = Synthetic construct
  source 1..22: mol_type = other DNA
tggtttgcgtcgcgagttgtga

SEQ ID NO: 10400 - DNA, 22 bp, synthetic construct
  misc_feature 1..22: note = Synthetic construct
  source 1..22: mol_type = other DNA
ggtttgcgtcgcgagttgtgag

SEQ ID NO: 10401 - DNA, 22 bp, synthetic construct
  misc_feature 1..22: note = Synthetic construct
  source 1..22: mol_type = other DNA
gtttgcgtcgcgagttgtgagg

SEQ ID NO: 10402 - DNA, 22 bp, synthetic construct
  misc_feature 1..22: note = Synthetic construct
  source 1..22: mol_type = other DNA
tttgcgtcgcgagttgtgaggc

SEQ ID NO: 10403 - DNA, 22 bp, synthetic construct
  misc_feature 1..22: note = Synthetic construct
  source 1..22: mol_type = other DNA
ttgcgtcgcgagttgtgaggct

SEQ ID NO: 10404 - DNA, 22 bp, synthetic construct
  misc_feature 1..22: note = Synthetic construct
  source 1..22: mol_type = other DNA
tgcgtcgcgagttgtgaggctg

SEQ ID NO: 10405 - DNA, 22 bp, synthetic construct
  misc_feature 1..22: note = Synthetic construct
  source 1..22: mol_type = other DNA
gcgtcgcgagttgtgaggctgt

SEQ ID NO: 10406 - DNA, 22 bp, synthetic construct
  misc_feature 1..22: note = Synthetic construct
  source 1..22: mol_type = other DNA
cgtcgcgagttgtgaggctgtc

SEQ ID NO: 10407 - DNA, 22 bp, synthetic construct
  misc_feature 1..22: note = Synthetic construct
  source 1..22: mol_type = other DNA
gtcgcgagttgtgaggctgtcg

SEQ ID NO: 10408 - DNA, 22 bp, synthetic construct
  misc_feature 1..22: note = Synthetic construct
  source 1..22: mol_type = other DNA
tcgcgagttgtgaggctgtcga

SEQ ID NO: 10409 - DNA, 22 bp, synthetic construct
  misc_feature 1..22: note = Synthetic construct
  source 1..22: mol_type = other DNA
cgcgagttgtgaggctgtcgac

SEQ ID NO: 10410 - DNA, 22 bp, synthetic construct
  misc_feature 1..22: note = Synthetic construct
  source 1..22: mol_type = other DNA
gcgagttgtgaggctgtcgacc

SEQ ID NO: 10411 - DNA, 22 bp, synthetic construct
  misc_feature 1..22: note = Synthetic construct
  source 1..22: mol_type = other DNA
cgagttgtgaggctgtcgacct

SEQ ID NO: 10412 - DNA, 22 bp, synthetic construct
  misc_feature 1..22: note = Synthetic construct
  source 1..22: mol_type = other DNA
gagttgtgaggctgtcgacctg

SEQ ID NO: 10413 - DNA, 22 bp, synthetic construct
  misc_feature 1..22: note = Synthetic construct
  source 1..22: mol_type = other DNA
agttgtgaggctgtcgacctgg

SEQ ID NO: 10414 - DNA, 22 bp, synthetic construct
  misc_feature 1..22: note = Synthetic construct
  source 1..22: mol_type = other DNA
gttgtgaggctgtcgacctggc

SEQ ID NO: 10415 - DNA, 22 bp, synthetic construct
  misc_feature 1..22: note = Synthetic construct
  source 1..22: mol_type = other DNA
ttgtgaggctgtcgacctggcc

SEQ ID NO: 10416 - DNA, 22 bp, synthetic construct
  misc_feature 1..22: note = Synthetic construct
  source 1..22: mol_type = other DNA
tgtgaggctgtcgacctggcct

SEQ ID NO: 10417 - DNA, 22 bp, synthetic construct
  misc_feature 1..22: note = Synthetic construct
  source 1..22: mol_type = other DNA
gtgaggctgtcgacctggcctc

SEQ ID NO: 10418 - DNA, 22 bp, synthetic construct
  misc_feature 1..22: note = Synthetic construct
  source 1..22: mol_type = other DNA
tgaggctgtcgacctggcctct

SEQ ID NO: 10419 - DNA, 22 bp, synthetic construct
  misc_feature 1..22: note = Synthetic construct
  source 1..22: mol_type = other DNA
gaggctgtcgacctggcctctg

SEQ ID NO: 10420 - DNA, 22 bp, synthetic construct
  misc_feature 1..22: note = Synthetic construct
  source 1..22: mol_type = other DNA
aggctgtcgacctggcctctgc

SEQ ID NO: 10421 - DNA, 22 bp, synthetic construct
  misc_feature 1..22: note = Synthetic construct
  source 1..22: mol_type = other DNA
ggctgtcgacctggcctctgct

SEQ ID NO: 10422 - DNA, 22 bp, synthetic construct
  misc_feature 1..22: note = Synthetic construct
  source 1..22: mol_type = other DNA
gctgtcgacctggcctctgcta

SEQ ID NO: 10423 - DNA, 22 bp, synthetic construct
  misc_feature 1..22: note = Synthetic construct
  source 1..22: mol_type = other DNA
ctgtcgacctggcctctgctaa

SEQ ID NO: 10424 - DNA, 22 bp, synthetic construct
  misc_feature 1..22: note = Synthetic construct
  source 1..22: mol_type = other DNA
tgtcgacctggcctctgctaaa

SEQ ID NO: 10425 - DNA, 22 bp, synthetic construct
  misc_feature 1..22: note = Synthetic construct
  source 1..22: mol_type = other DNA
gtcgacctggcctctgctaaag

SEQ ID NO: 10426 - DNA, 22 bp, synthetic construct
  misc_feature 1..22: note = Synthetic construct
  source 1..22: mol_type = other DNA
tcgacctggcctctgctaaagc

SEQ ID NO: 10427 - DNA, 22 bp, synthetic construct
  misc_feature 1..22: note = Synthetic construct
  source 1..22: mol_type = other DNA
cgacctggcctctgctaaagca

SEQ ID NO: 10428 - DNA, 22 bp, synthetic construct
  misc_feature 1..22: note = Synthetic construct
  source 1..22: mol_type = other DNA
gacctggcctctgctaaagcaa

SEQ ID NO: 10429 - DNA, 22 bp, synthetic construct
  misc_feature 1..22: note = Synthetic construct
  source 1..22: mol_type = other DNA
acctggcctctgctaaagcaac

SEQ ID NO: 10430 - DNA, 22 bp, synthetic construct
  misc_feature 1..22: note = Synthetic construct
  source 1..22: mol_type = other DNA
cctggcctctgctaaagcaaca

SEQ ID NO: 10431 - DNA, 22 bp, synthetic construct
  misc_feature 1..22: note = Synthetic construct
  source 1..22: mol_type = other DNA
ctggcctctgctaaagcaacac

SEQ ID NO: 10432 - DNA, 22 bp, synthetic construct
  misc_feature 1..22: note = Synthetic construct
  source 1..22: mol_type = other DNA
tggcctctgctaaagcaacacc

SEQ ID NO: 10433 - DNA, 22 bp, synthetic construct
  misc_feature 1..22: note = Synthetic construct
  source 1..22: mol_type = other DNA
ggcctctgctaaagcaacacca

SEQ ID NO: 10434 - DNA, 22 bp, synthetic construct
  misc_feature 1..22: note = Synthetic construct
  source 1..22: mol_type = other DNA
gcctctgctaaagcaacaccaa

SEQ ID NO: 10435 - DNA, 22 bp, synthetic construct
  misc_feature 1..22: note = Synthetic construct
  source 1..22: mol_type = other DNA
cctctgctaaagcaacaccaag

SEQ ID NO: 10436 - DNA, 22 bp, synthetic construct
  misc_feature 1..22: note = Synthetic construct
  source 1..22: mol_type = other DNA
ctctgctaaagcaacaccaagg

SEQ ID NO: 10437 - DNA, 22 bp, synthetic construct
  misc_feature 1..22: note = Synthetic construct
  source 1..22: mol_type = other DNA
tctgctaaagcaacaccaaggt

SEQ ID NO: 10438 - DNA, 22 bp, synthetic construct
  misc_feature 1..22: note = Synthetic construct
  source 1..22: mol_type = other DNA
ctgctaaagcaacaccaaggtt

SEQ ID NO: 10439 - DNA, 22 bp, synthetic construct
  misc_feature 1..22: note = Synthetic construct
  source 1..22: mol_type = other DNA
tgctaaagcaacaccaaggtta

SEQ ID NO: 10440 - DNA, 22 bp, synthetic construct
  misc_feature 1..22: note = Synthetic construct
  source 1..22: mol_type = other DNA
gctaaagcaacaccaaggttaa

SEQ ID NO: 10441 - DNA, 22 bp, synthetic construct
  misc_feature 1..22: note = Synthetic construct
  source 1..22: mol_type = other DNA
ctaaagcaacaccaaggttaaa

SEQ ID NO: 10442 - DNA, 22 bp, synthetic construct
  misc_feature 1..22: note = Synthetic construct
  source 1..22: mol_type = other DNA
taaagcaacaccaaggttaaaa

SEQ ID NO: 10443 - DNA, 22 bp, synthetic construct
  misc_feature 1..22: note = Synthetic construct
  source 1..22: mol_type = other DNA
aaagcaacaccaaggttaaaat

SEQ ID NO: 10444 - DNA, 22 bp, synthetic construct
  misc_feature 1..22: note = Synthetic construct
  source 1..22: mol_type = other DNA
aagcaacaccaaggttaaaatt

SEQ ID NO: 10445 - DNA, 22 bp, synthetic construct
  misc_feature 1..22: note = Synthetic construct
  source 1..22: mol_type = other DNA
agcaacaccaaggttaaaatta

SEQ ID NO: 10446 - DNA, 22 bp, synthetic construct
  misc_feature 1..22: note = Synthetic construct
  source 1..22: mol_type = other DNA
gcaacaccaaggttaaaattac

SEQ ID NO: 10447 - DNA, 22 bp, synthetic construct
  misc_feature 1..22: note = Synthetic construct
  source 1..22: mol_type = other DNA
caacaccaaggttaaaattacc

SEQ ID NO: 10448 - DNA, 22 bp, synthetic construct
  misc_feature 1..22: note = Synthetic construct
  source 1..22: mol_type = other DNA
aacaccaaggttaaaattaccc

SEQ ID NO: 10449 - DNA, 22 bp, synthetic construct
  misc_feature 1..22: note = Synthetic construct
  source 1..22: mol_type = other DNA
acaccaaggttaaaattaccct

SEQ ID NO: 10450 - DNA, 22 bp, synthetic construct
  misc_feature 1..22: note = Synthetic construct
  source 1..22: mol_type = other DNA
caccaaggttaaaattaccctg

SEQ ID NO: 10451 - DNA, 22 bp, synthetic construct
  misc_feature 1..22: note = Synthetic construct
  source 1..22: mol_type = other DNA
accaaggttaaaattaccctgg

SEQ ID NO: 10452 - DNA, 22 bp, synthetic construct
  misc_feature 1..22: note = Synthetic construct
  source 1..22: mol_type = other DNA
ccaaggttaaaattaccctggg

SEQ ID NO: 10453 - DNA, 22 bp, synthetic construct
  misc_feature 1..22: note = Synthetic construct
  source 1..22: mol_type = other DNA
caaggttaaaattaccctgggt

SEQ ID NO: 10454 - DNA, 22 bp, synthetic construct
  misc_feature 1..22: note = Synthetic construct
  source 1..22: mol_type = other DNA
aaggttaaaattaccctgggtg

SEQ ID NO: 10455 - DNA, 22 bp, synthetic construct
  misc_feature 1..22: note = Synthetic construct
  source 1..22: mol_type = other DNA
aggttaaaattaccctgggtga

SEQ ID NO: 10456 - DNA, 22 bp, synthetic construct
  misc_feature 1..22: note = Synthetic construct
  source 1..22: mol_type = other DNA
ggttaaaattaccctgggtgac

SEQ ID NO: 10457 - DNA, 22 bp, synthetic construct
  misc_feature 1..22: note = Synthetic construct
  source 1..22: mol_type = other DNA
gttaaaattaccctgggtgacc

SEQ ID NO: 10458 - DNA, 22 bp, synthetic construct
  misc_feature 1..22: note = Synthetic construct
  source 1..22: mol_type = other DNA
ttaaaattaccctgggtgacct

SEQ ID NO: 10459 - DNA, 22 bp, synthetic construct
  misc_feature 1..22: note = Synthetic construct
  source 1..22: mol_type = other DNA
taaaattaccctgggtgacctt

SEQ ID NO: 10460 - DNA, 22 bp, synthetic construct
  misc_feature 1..22: note = Synthetic construct
  source 1..22: mol_type = other DNA
aaaattaccctgggtgaccttt

SEQ ID NO: 10461 - DNA, 22 bp, synthetic construct
  misc_feature 1..22: note = Synthetic construct
  source 1..22: mol_type = other DNA
aaattaccctgggtgacctttt

SEQ ID NO: 10462 - DNA, 22 bp, synthetic construct
  misc_feature 1..22: note = Synthetic construct
  source 1..22: mol_type = other DNA
aattaccctgggtgaccttttg

SEQ ID NO: 10463 - DNA, 22 bp, synthetic construct
  misc_feature 1..22: note = Synthetic construct
  source 1..22: mol_type = other DNA
attaccctgggtgaccttttgc

SEQ ID NO: 10464 - DNA, 22 bp, synthetic construct
  misc_feature 1..22: note = Synthetic construct
  source 1..22: mol_type = other DNA
ttaccctgggtgaccttttgca

SEQ ID NO: 10465 - DNA, 22 bp, synthetic construct
  misc_feature 1..22: note = Synthetic construct
  source 1..22: mol_type = other DNA
taccctgggtgaccttttgcag

SEQ ID NO: 10466 - DNA, 22 bp, synthetic construct
  misc_feature 1..22: note = Synthetic construct
  source 1..22: mol_type = other DNA
accctgggtgaccttttgcagg

SEQ ID NO: 10467 - DNA, 22 bp, synthetic construct
  misc_feature 1..22: note = Synthetic construct
  source 1..22: mol_type = other DNA
ccctgggtgaccttttgcagga

SEQ ID NO: 10468 - DNA, 22 bp, synthetic construct
  misc_feature 1..22: note = Synthetic construct
  source 1..22: mol_type = other DNA
cctgggtgaccttttgcaggac

SEQ ID NO: 10469 - DNA, 22 bp, synthetic construct
  misc_feature 1..22: note = Synthetic construct
  source 1..22: mol_type = other DNA
ctgggtgaccttttgcaggact

SEQ ID NO: 10470 - DNA, 22 bp, synthetic construct
  misc_feature 1..22: note = Synthetic construct
  source 1..22: mol_type = other DNA
tgggtgaccttttgcaggactt

SEQ ID NO: 10471 - DNA, 22 bp, synthetic construct
  misc_feature 1..22: note = Synthetic construct
  source 1..22: mol_type = other DNA
gggtgaccttttgcaggacttc

SEQ ID NO: 10472 - DNA, 22 bp, synthetic construct
  misc_feature 1..22: note = Synthetic construct
  source 1..22: mol_type = other DNA
ggtgaccttttgcaggacttcg

SEQ ID NO: 10473 - DNA, 22 bp, synthetic construct
  misc_feature 1..22: note = Synthetic construct
  source 1..22: mol_type = other DNA
gtgaccttttgcaggacttcgg

SEQ ID NO: 10474 - DNA, 22 bp, synthetic construct
  misc_feature 1..22: note = Synthetic construct
  source 1..22: mol_type = other DNA
tgaccttttgcaggacttcggt

SEQ ID NO: 10475 - DNA, 22 bp, synthetic construct
  misc_feature 1..22: note = Synthetic construct
  source 1..22: mol_type = other DNA
gaccttttgcaggacttcggtc

SEQ ID NO: 10476 - DNA, 22 bp, synthetic construct
  misc_feature 1..22: note = Synthetic construct
  source 1..22: mol_type = other DNA
accttttgcaggacttcggtcg

SEQ ID NO: 10477 - DNA, 22 bp, synthetic construct
  misc_feature 1..22: note = Synthetic construct
  source 1..22: mol_type = other DNA
ccttttgcaggacttcggtcga

SEQ ID NO: 10478 - DNA, 22 bp, synthetic construct
  misc_feature 1..22: note = Synthetic construct
  source 1..22: mol_type = other DNA
cttttgcaggacttcggtcgac

SEQ ID NO: 10479 - DNA, 22 bp, synthetic construct
  misc_feature 1..22: note = Synthetic construct
  source 1..22: mol_type = other DNA
ttttgcaggacttcggtcgacg

SEQ ID NO: 10480 - DNA, 22 bp, synthetic construct
  misc_feature 1..22: note = Synthetic construct
  source 1..22: mol_type = other DNA
tttgcaggacttcggtcgacgc

SEQ ID NO: 10481 - DNA, 22 bp, synthetic construct
  misc_feature 1..22: note = Synthetic construct
  source 1..22: mol_type = other DNA
ttgcaggacttcggtcgacgcc

SEQ ID NO: 10482 - DNA, 22 bp, synthetic construct
  misc_feature 1..22: note = Synthetic construct
  source 1..22: mol_type = other DNA
tgcaggacttcggtcgacgccc

SEQ ID NO: 10483 - DNA, 22 bp, synthetic construct
  misc_feature 1..22: note = Synthetic construct
  source 1..22: mol_type = other DNA
gcaggacttcggtcgacgcccg

SEQ ID NO: 10484 - DNA, 22 bp, synthetic construct
  misc_feature 1..22: note = Synthetic construct
  source 1..22: mol_type = other DNA
caggacttcggtcgacgcccgg

SEQ ID NO: 10485 - DNA, 22 bp, synthetic construct
  misc_feature 1..22: note = Synthetic construct
  source 1..22: mol_type = other DNA
aggacttcggtcgacgcccggt

SEQ ID NO: 10486 - DNA, 22 bp, synthetic construct
  misc_feature 1..22: note = Synthetic construct
  source 1..22: mol_type = other DNA
ggacttcggtcgacgcccggtt

SEQ ID NO: 10487 - DNA, 22 bp, synthetic construct
  misc_feature 1..22: note = Synthetic construct
  source 1..22: mol_type = other DNA
gacttcggtcgacgcccggttc

SEQ ID NO: 10488 - DNA, 22 bp, synthetic construct
  misc_feature 1..22: note = Synthetic construct
  source 1..22: mol_type = other DNA
acttcggtcgacgcccggttcg

SEQ ID NO: 10489 - DNA, 22 bp, synthetic construct
  misc_feature 1..22: note = Synthetic construct
  source 1..22: mol_type = other DNA
cttcggtcgacgcccggttcgc

SEQ ID NO: 10490 - DNA, 22 bp, synthetic construct
  misc_feature 1..22: note = Synthetic construct
  source 1..22: mol_type = other DNA
ttcggtcgacgcccggttcgca

SEQ ID NO: 10491 - DNA, 22 bp, synthetic construct
  misc_feature 1..22: note = Synthetic construct
  source 1..22: mol_type = other DNA
tcggtcgacgcccggttcgcaa

SEQ ID NO: 10492 - DNA, 22 bp, synthetic construct
  misc_feature 1..22: note = Synthetic construct
  source 1..22: mol_type = other DNA
cggtcgacgcccggttcgcaac

SEQ ID NO: 10493 - DNA, 22 bp, synthetic construct
  misc_feature 1..22: note = Synthetic construct
  source 1..22: mol_type = other DNA
ggtcgacgcccggttcgcaacg

SEQ ID NO: 10494 - DNA, 22 bp, synthetic construct
  misc_feature 1..22: note = Synthetic construct
  source 1..22: mol_type = other DNA
gtcgacgcccggttcgcaacgt

SEQ ID NO: 10495 - DNA, 22 bp, synthetic construct
  misc_feature 1..22: note = Synthetic construct
  source 1..22: mol_type = other DNA
tcgacgcccggttcgcaacgtt

SEQ ID NO: 10496 - DNA, 22 bp, synthetic construct
  misc_feature 1..22: note = Synthetic construct
  source 1..22: mol_type = other DNA
cgacgcccggttcgcaacgttc

SEQ ID NO: 10497 - DNA, 22 bp, synthetic construct
  misc_feature 1..22: note = Synthetic construct
  source 1..22: mol_type = other DNA
gacgcccggttcgcaacgttct

SEQ ID NO: 10498 - DNA, 22 bp, synthetic construct
  misc_feature 1..22: note = Synthetic construct
  source 1..22: mol_type = other DNA
acgcccggttcgcaacgttctg

SEQ ID NO: 10499 - DNA, 22 bp, synthetic construct
  misc_feature 1..22: note = Synthetic construct
  source 1..22: mol_type = other DNA
cgcccggttcgcaacgttctgc

SEQ ID NO: 10500 - DNA, 22 bp, synthetic construct
  misc_feature 1..22: note = Synthetic construct
  source 1..22: mol_type = other DNA
gcccggttcgcaacgttctgcg

SEQ ID NO: 10501 - DNA, 22 bp, synthetic construct
  misc_feature 1..22: note = Synthetic construct
  source 1..22: mol_type = other DNA
cccggttcgcaacgttctgcgg

SEQ ID NO: 10502 - DNA, 22 bp, synthetic construct
  misc_feature 1..22: note = Synthetic construct
  source 1..22: mol_type = other DNA
ccggttcgcaacgttctgcggc

SEQ ID NO: 10503 - DNA, 22 bp, synthetic construct
  misc_feature 1..22: note = Synthetic construct
  source 1..22: mol_type = other DNA
cggttcgcaacgttctgcggca

SEQ ID NO: 10504 - DNA, 22 bp, synthetic construct
  misc_feature 1..22: note = Synthetic construct
  source 1..22: mol_type = other DNA
ggttcgcaacgttctgcggcac

SEQ ID NO: 10505 - DNA, 22 bp, synthetic construct
  misc_feature 1..22: note = Synthetic construct
  source 1..22: mol_type = other DNA
gttcgcaacgttctgcggcact

SEQ ID NO: 10506 - DNA, 22 bp, synthetic construct
  misc_feature 1..22: note = Synthetic construct
  source 1..22: mol_type = other DNA
ttcgcaacgttctgcggcactt

SEQ ID NO: 10507 - DNA, 22 bp, synthetic construct
  misc_feature 1..22: note = Synthetic construct
  source 1..22: mol_type = other DNA
tcgcaacgttctgcggcacttc

SEQ ID NO: 10508 - DNA, 22 bp, synthetic construct
  misc_feature 1..22: note = Synthetic construct
  source 1..22: mol_type = other DNA
cgcaacgttctgcggcacttcg

SEQ ID NO: 10509 - DNA, 22 bp, synthetic construct
  misc_feature 1..22: note = Synthetic construct
  source 1..22: mol_type = other DNA
gcaacgttctgcggcacttcga

SEQ ID NO: 10510 - DNA, 22 bp, synthetic construct
  misc_feature 1..22: note = Synthetic construct
  source 1..22: mol_type = other DNA
caacgttctgcggcacttcgat

SEQ ID NO: 10511 - DNA, 22 bp, synthetic construct
  misc_feature 1..22: note = Synthetic construct
  source 1..22: mol_type = other DNA
aacgttctgcggcacttcgatg

SEQ ID NO: 10512 - DNA, 22 bp, synthetic construct
  misc_feature 1..22: note = Synthetic construct
  source 1..22: mol_type = other DNA
acgttctgcggcacttcgatgt

SEQ ID NO: 10513 - DNA, 22 bp, synthetic construct
  misc_feature 1..22: note = Synthetic construct
  source 1..22: mol_type = other DNA
cgttctgcggcacttcgatgta

SEQ ID NO: 10514 - DNA, 22 bp, synthetic construct
  misc_feature 1..22: note = Synthetic construct
  source 1..22: mol_type = other DNA
gttctgcggcacttcgatgtaa

SEQ ID NO: 10515 - DNA, 22 bp, synthetic construct
  misc_feature 1..22: note = Synthetic construct
  source 1..22: mol_type = other DNA
ttctgcggcacttcgatgtaag

SEQ ID NO: 10516 - DNA, 22 bp, synthetic construct
  misc_feature 1..22: note = Synthetic construct
  source 1..22: mol_type = other DNA
tctgcggcacttcgatgtaagt

SEQ ID NO: 10517 - DNA, 22 bp, synthetic construct
  misc_feature 1..22: note = Synthetic construct
  source 1..22: mol_type = other DNA
ctgcggcacttcgatgtaagtc

SEQ ID NO: 10518 - DNA, 22 bp, synthetic construct
  misc_feature 1..22: note = Synthetic construct
  source 1..22: mol_type = other DNA
tgcggcacttcgatgtaagtca

SEQ ID NO: 10519 - DNA, 22 bp, synthetic construct
  misc_feature 1..22: note = Synthetic construct
  source 1..22: mol_type = other DNA
gcggcacttcgatgtaagtcaa

SEQ ID NO: 10520 - DNA, 22 bp, synthetic construct
  misc_feature 1..22: note = Synthetic construct
  source 1..22: mol_type = other DNA
cggcacttcgatgtaagtcaag

SEQ ID NO: 10521 - DNA, 22 bp, synthetic construct
  misc_feature 1..22: note = Synthetic construct
  source 1..22: mol_type = other DNA
ggcacttcgatgtaagtcaagt

SEQ ID NO: 10522 - DNA, 22 bp, synthetic construct
  misc_feature 1..22: note = Synthetic construct
  source 1..22: mol_type = other DNA
gcacttcgatgtaagtcaagtt

SEQ ID NO: 10523 - DNA, 22 bp, synthetic construct
  misc_feature 1..22: note = Synthetic construct
  source 1..22: mol_type = other DNA
cacttcgatgtaagtcaagttt

SEQ ID NO: 10524 - DNA, 22 bp, synthetic construct
  misc_feature 1..22: note = Synthetic construct
  source 1..22: mol_type = other DNA
acttcgatgtaagtcaagtttt

SEQ ID NO: 10525 - DNA, 22 bp, synthetic construct
  misc_feature 1..22: note = Synthetic construct
  source 1..22: mol_type = other DNA
cttcgatgtaagtcaagttttg

SEQ ID NO: 10526 - DNA, 22 bp, synthetic construct
  misc_feature 1..22: note = Synthetic construct
  source 1..22: mol_type = other DNA
ttcgatgtaagtcaagttttgg

SEQ ID NO: 10527 - DNA, 22 bp, synthetic construct
  misc_feature 1..22: note = Synthetic construct
  source 1..22: mol_type = other DNA
tcgatgtaagtcaagttttggc

SEQ ID NO: 10528 - DNA, 22 bp, synthetic construct
  misc_feature 1..22: note = Synthetic construct
  source 1..22: mol_type = other DNA
cgatgtaagtcaagttttggct

SEQ ID NO: 10529 - DNA, 22 bp, synthetic construct
  misc_feature 1..22: note = Synthetic construct
  source 1..22: mol_type = other DNA
gatgtaagtcaagttttggctt

SEQ ID NO: 10530 - DNA, 22 bp, synthetic construct
  misc_feature 1..22: note = Synthetic construct
  source 1..22: mol_type = other DNA
atgtaagtcaagttttggctta

SEQ ID NO: 10531 - DNA, 22 bp, synthetic construct
  misc_feature 1..22: note = Synthetic construct
  source 1..22: mol_type = other DNA
tgtaagtcaagttttggcttac

SEQ ID NO: 10532 - DNA, 22 bp, synthetic construct
  misc_feature 1..22: note = Synthetic construct
  source 1..22: mol_type = other DNA
gtaagtcaagttttggcttaca

SEQ ID NO: 10533 - DNA, 22 bp, synthetic construct
  misc_feature 1..22: note = Synthetic construct
  source 1..22: mol_type = other DNA
taagtcaagttttggcttacag

SEQ ID NO: 10534 - DNA, 22 bp, synthetic construct
  misc_feature 1..22: note = Synthetic construct
  source 1..22: mol_type = other DNA
aagtcaagttttggcttacagg

SEQ ID NO: 10535 - DNA, 22 bp, synthetic construct
  misc_feature 1..22: note = Synthetic construct
  source 1..22: mol_type = other DNA
agtcaagttttggcttacaggg

SEQ ID NO: 10536 - DNA, 22 bp, synthetic construct
  misc_feature 1..22: note = Synthetic construct
  source 1..22: mol_type = other DNA
gtcaagttttggcttacaggga

SEQ ID NO: 10537 - DNA, 22 bp, synthetic construct
  misc_feature 1..22: note = Synthetic construct
  source 1..22: mol_type = other DNA
tcaagttttggcttacagggaa

SEQ ID NO: 10538 - DNA, 22 bp, synthetic construct
  misc_feature 1..22: note = Synthetic construct
  source 1..22: mol_type = other DNA
caagttttggcttacagggaag

SEQ ID NO: 10539 - DNA, 22 bp, synthetic construct
  misc_feature 1..22: note = Synthetic construct
  source 1..22: mol_type = other DNA
aagttttggcttacagggaaga

SEQ ID NO: 10540 - DNA, 22 bp, synthetic construct
  misc_feature 1..22: note = Synthetic construct
  source 1..22: mol_type = other DNA
agttttggcttacagggaagag

SEQ ID NO: 10541 - DNA, 22 bp, synthetic construct
  misc_feature 1..22: note = Synthetic construct
  source 1..22: mol_type = other DNA
gttttggcttacagggaagagg

SEQ ID NO: 10542 - DNA, 22 bp, synthetic construct
  misc_feature 1..22: note = Synthetic construct
  source 1..22: mol_type = other DNA
ttttggcttacagggaagaggc

SEQ ID NO: 10543 - DNA, 22 bp, synthetic construct
  misc_feature 1..22: note = Synthetic construct
  source 1..22: mol_type = other DNA
tttggcttacagggaagaggct

SEQ ID NO: 10544 - DNA, 22 bp, synthetic construct
  misc_feature 1..22: note = Synthetic construct
  source 1..22: mol_type = other DNA
ttggcttacagggaagaggctg

SEQ ID NO: 10545 - DNA, 22 bp, synthetic construct
  misc_feature 1..22: note = Synthetic construct
  source 1..22: mol_type = other DNA
tggcttacagggaagaggctgt

SEQ ID NO: 10546 - DNA, 22 bp, synthetic construct
  misc_feature 1..22: note = Synthetic construct
  source 1..22: mol_type = other DNA
ggcttacagggaagaggctgta

SEQ ID NO: 10547 - DNA, 22 bp, synthetic construct
  misc_feature 1..22: note = Synthetic construct
  source 1..22: mol_type = other DNA
gcttacagggaagaggctgtag

SEQ ID NO: 10548 - DNA, 22 bp, synthetic construct
  misc_feature 1..22: note = Synthetic construct
  source 1..22: mol_type = other DNA
cttacagggaagaggctgtagc

SEQ ID NO: 10549 - DNA, 22 bp, synthetic construct
  misc_feature 1..22: note = Synthetic construct
  source 1..22: mol_type = other DNA
ttacagggaagaggctgtagca

SEQ ID NO: 10550 - DNA, 22 bp, synthetic construct
  misc_feature 1..22: note = Synthetic construct
  source 1..22: mol_type = other DNA
tacagggaagaggctgtagcag

SEQ ID NO: 10551 - DNA, 22 bp, synthetic construct
  misc_feature 1..22: note = Synthetic construct
  source 1..22: mol_type = other DNA
acagggaagaggctgtagcagg

SEQ ID NO: 10552 - DNA, 22 bp, synthetic construct
  misc_feature 1..22: note = Synthetic construct
  source 1..22: mol_type = other DNA
cagggaagaggctgtagcagga

SEQ ID NO: 10553 - DNA, 22 bp, synthetic construct
  misc_feature 1..22: note = Synthetic construct
  source 1..22: mol_type = other DNA
agggaagaggctgtagcaggag

SEQ ID NO: 10554 - DNA, 22 bp, synthetic construct
  misc_feature 1..22: note = Synthetic construct
  source 1..22: mol_type = other DNA
gggaagaggctgtagcaggagc

SEQ ID NO: 10555 - DNA, 22 bp, synthetic construct
  misc_feature 1..22: note = Synthetic construct
  source 1..22: mol_type = other DNA
ggaagaggctgtagcaggagcg

SEQ ID NO: 10556 - DNA, 22 bp, synthetic construct
  misc_feature 1..22: note = Synthetic construct
  source 1..22: mol_type = other DNA
gaagaggctgtagcaggagcgt

SEQ ID NO: 10557 - DNA, 22 bp, synthetic construct
  misc_feature 1..22: note = Synthetic construct
  source 1..22: mol_type = other DNA
aagaggctgtagcaggagcgtg

SEQ ID NO: 10558 - DNA, 22 bp, synthetic construct
  misc_feature 1..22: note = Synthetic construct
  source 1..22: mol_type = other DNA
agaggctgtagcaggagcgtgc

SEQ ID NO: 10559 - DNA, 22 bp, synthetic construct
  misc_feature 1..22: note = Synthetic construct
  source 1..22: mol_type = other DNA
gaggctgtagcaggagcgtgcg

SEQ ID NO: 10560 - DNA, 22 bp, synthetic construct
  misc_feature 1..22: note = Synthetic construct
  source 1..22: mol_type = other DNA
aggctgtagcaggagcgtgcgt

SEQ ID NO: 10561 - DNA, 22 bp, synthetic construct
  misc_feature 1..22: note = Synthetic construct
  source 1..22: mol_type = other DNA
ggctgtagcaggagcgtgcgtc

SEQ ID NO: 10562 - DNA, 22 bp, synthetic construct
  misc_feature 1..22: note = Synthetic construct
  source 1..22: mol_type = other DNA
gctgtagcaggagcgtgcgtcg

SEQ ID NO: 10563 - DNA, 22 bp, synthetic construct
  misc_feature 1..22: note = Synthetic construct
  source 1..22: mol_type = other DNA
ctgtagcaggagcgtgcgtcga

SEQ ID NO: 10564 - DNA, 22 bp, synthetic construct
  misc_feature 1..22: note = Synthetic construct
  source 1..22: mol_type = other DNA
tgtagcaggagcgtgcgtcgag

SEQ ID NO: 10565 - DNA, 22 bp, synthetic construct
  misc_feature 1..22: note = Synthetic construct
  source 1..22: mol_type = other DNA
gtagcaggagcgtgcgtcgagg

SEQ ID NO: 10566 - DNA, 22 bp, synthetic construct
  misc_feature 1..22: note = Synthetic construct
  source 1..22: mol_type = other DNA
tagcaggagcgtgcgtcgaggg

SEQ ID NO: 10567 - DNA, 22 bp, synthetic construct
  misc_feature 1..22: note = Synthetic construct
  source 1..22: mol_type = other DNA
agcaggagcgtgcgtcgaggga

SEQ ID NO: 10568 - DNA, 22 bp, synthetic construct
  misc_feature 1..22: note = Synthetic construct
  source 1..22: mol_type = other DNA
gcaggagcgtgcgtcgagggag

SEQ ID NO: 10569 - DNA, 22 bp, synthetic construct
  misc_feature 1..22: note = Synthetic construct
  source 1..22: mol_type = other DNA
caggagcgtgcgtcgagggaga

SEQ ID NO: 10570 - DNA, 22 bp, synthetic construct
  misc_feature 1..22: note = Synthetic construct
  source 1..22: mol_type = other DNA
aggagcgtgcgtcgagggagaa

SEQ ID NO: 10571 - DNA, 22 bp, synthetic construct
  misc_feature 1..22: note = Synthetic construct
  source 1..22: mol_type = other DNA
ggagcgtgcgtcgagggagaag

SEQ ID NO: 10572 - DNA, 22 bp, synthetic construct
  misc_feature 1..22: note = Synthetic construct
  source 1..22: mol_type = other DNA
gagcgtgcgtcgagggagaagc

SEQ ID NO: 10573 - DNA, 22 bp, synthetic construct
  misc_feature 1..22: note = Synthetic construct
  source 1..22: mol_type = other DNA
agcgtgcgtcgagggagaagcc

SEQ ID NO: 10574 - DNA, 22 bp, synthetic construct
  misc_feature 1..22: note = Synthetic construct
  source 1..22: mol_type = other DNA
gcgtgcgtcgagggagaagccg

SEQ ID NO: 10575 - DNA, 22 bp, synthetic construct
  misc_feature 1..22: note = Synthetic construct
  source 1..22: mol_type = other DNA
cgtgcgtcgagggagaagccga

SEQ ID NO: 10576 - DNA, 22 bp, synthetic construct
  misc_feature 1..22: note = Synthetic construct
  source 1..22: mol_type = other DNA
gtgcgtcgagggagaagccgaa

SEQ ID NO: 10577 - DNA, 22 bp, synthetic construct
  misc_feature 1..22: note = Synthetic construct
  source 1..22: mol_type = other DNA
tgcgtcgagggagaagccgaaa

SEQ ID NO: 10578 - DNA, 22 bp, synthetic construct
  misc_feature 1..22: note = Synthetic construct
  source 1..22: mol_type = other DNA
gcgtcgagggagaagccgaaac

SEQ ID NO: 10579 - DNA, 22 bp, synthetic construct
  misc_feature 1..22: note = Synthetic construct
  source 1..22: mol_type = other DNA
cgtcgagggagaagccgaaacc

SEQ ID NO: 10580 - DNA, 22 bp, synthetic construct
  misc_feature 1..22: note = Synthetic construct
  source 1..22: mol_type = other DNA
gtcgagggagaagccgaaaccg

SEQ ID NO: 10581 - DNA, 22 bp, synthetic construct
  misc_feature 1..22: note = Synthetic construct
  source 1..22: mol_type = other DNA
tcgagggagaagccgaaaccgg

SEQ ID NO: 10582 - DNA, 22 bp, synthetic construct
  misc_feature 1..22: note = Synthetic construct
  source 1..22: mol_type = other DNA
cgagggagaagccgaaaccggc

SEQ ID NO: 10583 - DNA, 22 bp, synthetic construct
  misc_feature 1..22: note = Synthetic construct
  source 1..22: mol_type = other DNA
gagggagaagccgaaaccggct

SEQ ID NO: 10584 - DNA, 22 bp, synthetic construct
  misc_feature 1..22: note = Synthetic construct
  source 1..22: mol_type = other DNA
agggagaagccgaaaccggctt

SEQ ID NO: 10585 - DNA, 22 bp, synthetic construct
  misc_feature 1..22: note = Synthetic construct
  source 1..22: mol_type = other DNA
gggagaagccgaaaccggcttt

SEQ ID NO: 10586 - DNA, 22 bp, synthetic construct
  misc_feature 1..22: note = Synthetic construct
  source 1..22: mol_type = other DNA
ggagaagccgaaaccggctttc

SEQ ID NO: 10587 - DNA, 22 bp, synthetic construct
  misc_feature 1..22: note = Synthetic construct
  source 1..22: mol_type = other DNA
gagaagccgaaaccggctttct

SEQ ID NO: 10588 - DNA, 22 bp, synthetic construct
  misc_feature 1..22: note = Synthetic construct
  source 1..22: mol_type = other DNA
agaagccgaaaccggctttctc

SEQ ID NO: 10589 - DNA, 22 bp, synthetic construct
  misc_feature 1..22: note = Synthetic construct
  source 1..22: mol_type = other DNA
gaagccgaaaccggctttctcc

SEQ ID NO: 10590 - DNA, 22 bp, synthetic construct
  misc_feature 1..22: note = Synthetic construct
  source 1..22: mol_type = other DNA
aagccgaaaccggctttctcct

SEQ ID NO: 10591 - DNA, 22 bp, synthetic construct
  misc_feature 1..22: note = Synthetic construct
  source 1..22: mol_type = other DNA
agccgaaaccggctttctcctc

SEQ ID NO: 10592 - DNA, 22 bp, synthetic construct
  misc_feature 1..22: note = Synthetic construct
  source 1..22: mol_type = other DNA
gccgaaaccggctttctcctcg

SEQ ID NO: 10593 - DNA, 22 bp, synthetic construct
  misc_feature 1..22: note = Synthetic construct
  source 1..22: mol_type = other DNA
ccgaaaccggctttctcctcgt

SEQ ID NO: 10594 - DNA, 22 bp, synthetic construct
  misc_feature 1..22: note = Synthetic construct
  source 1..22: mol_type = other DNA
cgaaaccggctttctcctcgta

SEQ ID NO: 10595 - DNA, 22 bp, synthetic construct
  misc_feature 1..22: note = Synthetic construct
  source 1..22: mol_type = other DNA
gaaaccggctttctcctcgtac

SEQ ID NO: 10596 - DNA, 22 bp, synthetic construct
  misc_feature 1..22: note = Synthetic construct
  source 1..22: mol_type = other DNA
aaaccggctttctcctcgtacg

SEQ ID NO: 10597 - DNA, 22 bp, synthetic construct
  misc_feature 1..22: note = Synthetic construct
  source 1..22: mol_type = other DNA
aaccggctttctcctcgtacgg

SEQ ID NO: 10598 - DNA, 22 bp, synthetic construct
  misc_feature 1..22: note = Synthetic construct
  source 1..22: mol_type = other DNA
accggctttctcctcgtacggg

SEQ ID NO: 10599 - DNA, 22 bp, synthetic construct
  misc_feature 1..22: note = Synthetic construct
  source 1..22: mol_type = other DNA
ccggctttctcctcgtacgggc

SEQ ID NO: 10600 - DNA, 22 bp, synthetic construct
  misc_feature 1..22: note = Synthetic construct
  source 1..22: mol_type = other DNA
cggctttctcctcgtacgggcg

SEQ ID NO: 10601 - DNA, 22 bp, synthetic construct
  misc_feature 1..22: note = Synthetic construct
  source 1..22: mol_type = other DNA
ggctttctcctcgtacgggcga

SEQ ID NO: 10602 - DNA, 22 bp, synthetic construct
  misc_feature 1..22: note = Synthetic construct
  source 1..22: mol_type = other DNA
gctttctcctcgtacgggcgac

SEQ ID NO: 10603 - DNA, 22 bp, synthetic construct
  misc_feature 1..22: note = Synthetic construct
  source 1..22: mol_type = other DNA
ctttctcctcgtacgggcgacc

SEQ ID NO: 10604 - DNA, 22 bp, synthetic construct
  misc_feature 1..22: note = Synthetic construct
  source 1..22: mol_type = other DNA
tttctcctcgtacgggcgaccc

SEQ ID NO: 10605 - DNA, 22 bp, synthetic construct
  misc_feature 1..22: note = Synthetic construct
  source 1..22: mol_type = other DNA
ttctcctcgtacgggcgacccc

SEQ ID NO: 10606 - DNA, 22 bp, synthetic construct
  misc_feature 1..22: note = Synthetic construct
  source 1..22: mol_type = other DNA
tctcctcgtacgggcgacccca

SEQ ID NO: 10607 - DNA, 22 bp, synthetic construct
  misc_feature 1..22: note = Synthetic construct
  source 1..22: mol_type = other DNA
ctcctcgtacgggcgaccccac

SEQ ID NO: 10608 - DNA, 22 bp, synthetic construct
  misc_feature 1..22: note = Synthetic construct
  source 1..22: mol_type = other DNA
tcctcgtacgggcgaccccacg

SEQ ID NO: 10609 - DNA, 22 bp, synthetic construct
  misc_feature 1..22: note = Synthetic construct
  source 1..22: mol_type = other DNA
cctcgtacgggcgaccccacga

SEQ ID NO: 10610 - DNA, 22 bp, synthetic construct
  misc_feature 1..22: note = Synthetic construct
  source 1..22: mol_type = other DNA
ctcgtacgggcgaccccacgat

SEQ ID NO: 10611 - DNA, 22 bp, synthetic construct
  misc_feature 1..22: note = Synthetic construct
  source 1..22: mol_type = other DNA
tcgtacgggcgaccccacgatg

SEQ ID NO: 10612 - DNA, 22 bp, synthetic construct
  misc_feature 1..22: note = Synthetic construct
  source 1..22: mol_type = other DNA
cgtacgggcgaccccacgatga

SEQ ID NO: 10613 - DNA, 22 bp, synthetic construct
  misc_feature 1..22: note = Synthetic construct
  source 1..22: mol_type = other DNA
gtacgggcgaccccacgatgac

SEQ ID NO: 10614 - DNA, 22 bp, synthetic construct
  misc_feature 1..22: note = Synthetic construct
  source 1..22: mol_type = other DNA
tacgggcgaccccacgatgacc

SEQ ID NO: 10615 - DNA, 22 bp, synthetic construct
  misc_feature 1..22: note = Synthetic construct
  source 1..22: mol_type = other DNA
acgggcgaccccacgatgaccc

SEQ ID NO: 10616 - DNA, 22 bp, synthetic construct
  misc_feature 1..22: note = Synthetic construct
  source 1..22: mol_type = other DNA
cgggcgaccccacgatgaccca

SEQ ID NO: 10617 - DNA, 22 bp, synthetic construct
  misc_feature 1..22: note = Synthetic construct
  source 1..22: mol_type = other DNA
gggcgaccccacgatgacccac

SEQ ID NO: 10618 - DNA, 22 bp, synthetic construct
  misc_feature 1..22: note = Synthetic construct
  source 1..22: mol_type = other DNA
ggcgaccccacgatgacccact

SEQ ID NO: 10619 - DNA, 22 bp, synthetic construct
  misc_feature 1..22: note = Synthetic construct
  source 1..22: mol_type = other DNA
gcgaccccacgatgacccactt

SEQ ID NO: 10620 - DNA, 22 bp, synthetic construct
  misc_feature 1..22: note = Synthetic construct
  source 1..22: mol_type = other DNA
cgaccccacgatgacccacttc

SEQ ID NO: 10621 - DNA, 22 bp, synthetic construct
  misc_feature 1..22: note = Synthetic construct
  source 1..22: mol_type = other DNA
gaccccacgatgacccacttcg

SEQ ID NO: 10622 - DNA, 22 bp, synthetic construct
  misc_feature 1..22: note = Synthetic construct
  source 1..22: mol_type = other DNA
accccacgatgacccacttcgc

SEQ ID NO: 10623 - DNA, 22 bp, synthetic construct
  misc_feature 1..22: note = Synthetic construct
  source 1..22: mol_type = other DNA
ccccacgatgacccacttcgct

SEQ ID NO: 10624 - DNA, 22 bp, synthetic construct
  misc_feature 1..22: note = Synthetic construct
  source 1..22: mol_type = other DNA
cccacgatgacccacttcgctt

SEQ ID NO: 10625 - DNA, 22 bp, synthetic construct
  misc_feature 1..22: note = Synthetic construct
  source 1..22: mol_type = other DNA
ccacgatgacccacttcgcttg

SEQ ID NO: 10626 - DNA, 22 bp, synthetic construct
  misc_feature 1..22: note = Synthetic construct
  source 1..22: mol_type = other DNA
cacgatgacccacttcgcttgt

SEQ ID NO: 10627 - DNA, 22 bp, synthetic construct
  misc_feature 1..22: note = Synthetic construct
  source 1..22: mol_type = other DNA
acgatgacccacttcgcttgta

SEQ ID NO: 10628 - DNA, 22 bp, synthetic construct
  misc_feature 1..22: note = Synthetic construct
  source 1..22: mol_type = other DNA
cgatgacccacttcgcttgtag

SEQ ID NO: 10629 - DNA, 22 bp, synthetic construct
  misc_feature 1..22: note = Synthetic construct
  source 1..22: mol_type = other DNA
gatgacccacttcgcttgtagg

SEQ ID NO: 10630 - DNA, 22 bp, synthetic construct
  misc_feature 1..22: note = Synthetic construct
  source 1..22: mol_type = other DNA
atgacccacttcgcttgtaggc

SEQ ID NO: 10631 - DNA, 22 bp, synthetic construct
  misc_feature 1..22: note = Synthetic construct
  source 1..22: mol_type = other DNA
tgacccacttcgcttgtaggca

SEQ ID NO: 10632 - DNA, 22 bp, synthetic construct
  misc_feature 1..22: note = Synthetic construct
  source 1..22: mol_type = other DNA
gacccacttcgcttgtaggcac

SEQ ID NO: 10633 - DNA, 22 bp, synthetic construct
  misc_feature 1..22: note = Synthetic construct
  source 1..22: mol_type = other DNA
acccacttcgcttgtaggcacc

SEQ ID NO: 10634 - DNA, 22 bp, synthetic construct
  misc_feature 1..22: note = Synthetic construct
  source 1..22: mol_type = other DNA
cccacttcgcttgtaggcacct

SEQ ID NO: 10635 - DNA, 22 bp, synthetic construct
  misc_feature 1..22: note = Synthetic construct
  source 1..22: mol_type = other DNA
ccacttcgcttgtaggcacctt

SEQ ID NO: 10636 - DNA, 22 bp, synthetic construct
  misc_feature 1..22: note = Synthetic construct
  source 1..22: mol_type = other DNA
cacttcgcttgtaggcaccttg

SEQ ID NO: 10637 - DNA, 22 bp, synthetic construct
  misc_feature 1..22: note = Synthetic construct
  source 1..22: mol_type = other DNA
acttcgcttgtaggcaccttga

SEQ ID NO: 10638 - DNA, 22 bp, synthetic construct
  misc_feature 1..22: note = Synthetic construct
  source 1..22: mol_type = other DNA
cttcgcttgtaggcaccttgat

SEQ ID NO: 10639 - DNA, 22 bp, synthetic construct
  misc_feature 1..22: note = Synthetic construct
  source 1..22: mol_type = other DNA
ttcgcttgtaggcaccttgatc

SEQ ID NO: 10640 - DNA, 22 bp, synthetic construct
  misc_feature 1..22: note = Synthetic construct
  source 1..22: mol_type = other DNA
tcgcttgtaggcaccttgatct

SEQ ID NO: 10641 - DNA, 22 bp, synthetic construct
  misc_feature 1..22: note = Synthetic construct
  source 1..22: mol_type = other DNA
cgcttgtaggcaccttgatcta

SEQ ID NO: 10642 - DNA, 22 bp, synthetic construct
  misc_feature 1..22: note = Synthetic construct
  source 1..22: mol_type = other DNA
gcttgtaggcaccttgatctat

SEQ ID NO: 10643 - DNA, 22 bp, synthetic construct
  misc_feature 1..22: note = Synthetic construct
  source 1..22: mol_type = other DNA
cttgtaggcaccttgatctatc

SEQ ID NO: 10644 - DNA, 22 bp, synthetic construct
  misc_feature 1..22: note = Synthetic construct
  source 1..22: mol_type = other DNA
ttgtaggcaccttgatctatcg

SEQ ID NO: 10645 - DNA, 22 bp, synthetic construct
  misc_feature 1..22: note = Synthetic construct
  source 1..22: mol_type = other DNA
tgtaggcaccttgatctatcga

SEQ ID NO: 10646 - DNA, 22 bp, synthetic construct
  misc_feature 1..22: note = Synthetic construct
  source 1..22: mol_type = other DNA
gtaggcaccttgatctatcgat

SEQ ID NO: 10647 - DNA, 22 bp, synthetic construct
  misc_feature 1..22: note = Synthetic construct
  source 1..22: mol_type = other DNA
taggcaccttgatctatcgatg

SEQ ID NO: 10648 - DNA, 22 bp, synthetic construct
  misc_feature 1..22: note = Synthetic construct
  source 1..22: mol_type = other DNA
aggcaccttgatctatcgatgt

SEQ ID NO: 10649 - DNA, 22 bp, synthetic construct
  misc_feature 1..22: note = Synthetic construct
  source 1..22: mol_type = other DNA
ggcaccttgatctatcgatgtg

SEQ ID NO: 10650 - DNA, 22 bp, synthetic construct
  misc_feature 1..22: note = Synthetic construct
  source 1..22: mol_type = other DNA
gcaccttgatctatcgatgtga

SEQ ID NO: 10651 - DNA, 22 bp, synthetic construct
  misc_feature 1..22: note = Synthetic construct
  source 1..22: mol_type = other DNA
caccttgatctatcgatgtgac

SEQ ID NO: 10652 - DNA, 22 bp, synthetic construct
  misc_feature 1..22: note = Synthetic construct
  source 1..22: mol_type = other DNA
accttgatctatcgatgtgaca

SEQ ID NO: 10653 - DNA, 22 bp, synthetic construct
  misc_feature 1..22: note = Synthetic construct
  source 1..22: mol_type = other DNA
ccttgatctatcgatgtgacac

SEQ ID NO: 10654 - DNA, 22 bp, synthetic construct
  misc_feature 1..22: note = Synthetic construct
  source 1..22: mol_type = other DNA
cttgatctatcgatgtgacact

SEQ ID NO: 10655 - DNA, 22 bp, synthetic construct
  misc_feature 1..22: note = Synthetic construct
  source 1..22: mol_type = other DNA
ttgatctatcgatgtgacactt

SEQ ID NO: 10656 - DNA, 22 bp, synthetic construct
  misc_feature 1..22: note = Synthetic construct
  source 1..22: mol_type = other DNA
tgatctatcgatgtgacactta

SEQ ID NO: 10657 - DNA, 22 bp, synthetic construct
  misc_feature 1..22: note = Synthetic construct
  source 1..22: mol_type = other DNA
gatctatcgatgtgacacttaa

SEQ ID NO: 10658 - DNA, 22 bp, synthetic construct
  misc_feature 1..22: note = Synthetic construct
  source 1..22: mol_type = other DNA
atctatcgatgtgacacttaac

SEQ ID NO: 10659 - DNA, 22 bp, synthetic construct
  misc_feature 1..22: note = Synthetic construct
  source 1..22: mol_type = other DNA
tctatcgatgtgacacttaacg

SEQ ID NO: 10660 - DNA, 22 bp, synthetic construct
  misc_feature 1..22: note = Synthetic construct
  source 1..22: mol_type = other DNA
ctatcgatgtgacacttaacgc

SEQ ID NO: 10661 - DNA, 22 bp, synthetic construct
  misc_feature 1..22: note = Synthetic construct
  source 1..22: mol_type = other DNA
tatcgatgtgacacttaacgcc

SEQ ID NO: 10662 - DNA, 22 bp, synthetic construct
  misc_feature 1..22: note = Synthetic construct
  source 1..22: mol_type = other DNA
atcgatgtgacacttaacgccc

SEQ ID NO: 10663 - DNA, 22 bp, synthetic construct
  misc_feature 1..22: note = Synthetic construct
  source 1..22: mol_type = other DNA
tcgatgtgacacttaacgcccc

SEQ ID NO: 10664 - DNA, 22 bp, synthetic construct
  misc_feature 1..22: note = Synthetic construct
  source 1..22: mol_type = other DNA
cgatgtgacacttaacgccccc

SEQ ID NO: 10665 - DNA, 22 bp, synthetic construct
  misc_feature 1..22: note = Synthetic construct
  source 1..22: mol_type = other DNA
gatgtgacacttaacgcccccc

SEQ ID NO: 10666 - DNA, 22 bp, synthetic construct
  misc_feature 1..22: note = Synthetic construct
  source 1..22: mol_type = other DNA
atgtgacacttaacgccccccg

SEQ ID NO: 10667 - DNA, 22 bp, synthetic construct
  misc_feature 1..22: note = Synthetic construct
  source 1..22: mol_type = other DNA
tgtgacacttaacgccccccgt

SEQ ID NO: 10668 - DNA, 22 bp, synthetic construct
  misc_feature 1..22: note = Synthetic construct
  source 1..22: mol_type = other DNA
gtgacacttaacgccccccgtg

SEQ ID NO: 10669 - DNA, 22 bp, synthetic construct
  misc_feature 1..22: note = Synthetic construct
  source 1..22: mol_type = other DNA
tgacacttaacgccccccgtga

SEQ ID NO: 10670 - DNA, 22 bp, synthetic construct
  misc_feature 1..22: note = Synthetic construct
  source 1..22: mol_type = other DNA
gacacttaacgccccccgtgaa

SEQ ID NO: 10671 - DNA, 22 bp, synthetic construct
  misc_feature 1..22: note = Synthetic construct
  source 1..22: mol_type = other DNA
acacttaacgccccccgtgaat

SEQ ID NO: 10672 - DNA, 22 bp, synthetic construct
  misc_feature 1..22: note = Synthetic construct
  source 1..22: mol_type = other DNA
cacttaacgccccccgtgaata

SEQ ID NO: 10673 - DNA, 22 bp, synthetic construct
  misc_feature 1..22: note = Synthetic construct
  source 1..22: mol_type = other DNA
acttaacgccccccgtgaatac

SEQ ID NO: 10674 - DNA, 22 bp, synthetic construct
  misc_feature 1..22: note = Synthetic construct
  source 1..22: mol_type = other DNA
cttaacgccccccgtgaatacg

SEQ ID NO: 10675 - DNA, 22 bp, synthetic construct
  misc_feature 1..22: note = Synthetic construct
  source 1..22: mol_type = other DNA
ttaacgccccccgtgaatacgg

SEQ ID NO: 10676 - DNA, 22 bp, synthetic construct
  misc_feature 1..22: note = Synthetic construct
  source 1..22: mol_type = other DNA
taacgccccccgtgaatacgga

SEQ ID NO: 10677 - DNA, 22 bp, synthetic construct
  misc_feature 1..22: note = Synthetic construct
  source 1..22: mol_type = other DNA
aacgccccccgtgaatacggag

SEQ ID NO: 10678 - DNA, 22 bp, synthetic construct
  misc_feature 1..22: note = Synthetic construct
  source 1..22: mol_type = other DNA
acgccccccgtgaatacggaga

SEQ ID NO: 10679 - DNA, 22 bp, synthetic construct
  misc_feature 1..22: note = Synthetic construct
  source 1..22: mol_type = other DNA
cgccccccgtgaatacggagag

SEQ ID NO: 10680 - DNA, 22 bp, synthetic construct
  misc_feature 1..22: note = Synthetic construct
  source 1..22: mol_type = other DNA
gccccccgtgaatacggagagg

SEQ ID NO: 10681 - DNA, 22 bp, synthetic construct
  misc_feature 1..22: note = Synthetic construct
  source 1..22: mol_type = other DNA
ccccccgtgaatacggagaggg

SEQ ID NO: 10682 - DNA, 22 bp, synthetic construct
  misc_feature 1..22: note = Synthetic construct
  source 1..22: mol_type = other DNA
cccccgtgaatacggagagggg

SEQ ID NO: 10683 - DNA, 22 bp, synthetic construct
  misc_feature 1..22: note = Synthetic construct
  source 1..22: mol_type = other DNA
ccccgtgaatacggagaggggt

SEQ ID NO: 10684 - DNA, 22 bp, synthetic construct
  misc_feature 1..22: note = Synthetic construct
  source 1..22: mol_type = other DNA
cccgtgaatacggagaggggta

SEQ ID NO: 10685 - DNA, 22 bp, synthetic construct
  misc_feature 1..22: note = Synthetic construct
  source 1..22: mol_type = other DNA
ccgtgaatacggagaggggtag

SEQ ID NO: 10686 - DNA, 22 bp, synthetic construct
  misc_feature 1..22: note = Synthetic construct
  source 1..22: mol_type = other DNA
cgtgaatacggagaggggtagt

SEQ ID NO: 10687 - DNA, 22 bp, synthetic construct
  misc_feature 1..22: note = Synthetic construct
  source 1..22: mol_type = other DNA
gtgaatacggagaggggtagtg

SEQ ID NO: 10688 - DNA, 22 bp, synthetic construct
  misc_feature 1..22: note = Synthetic construct
  source 1..22: mol_type = other DNA
tgaatacggagaggggtagtgc

SEQ ID NO: 10689 - DNA, 22 bp, synthetic construct
  misc_feature 1..22: note = Synthetic construct
  source 1..22: mol_type = other DNA
gaatacggagaggggtagtgcc

SEQ ID NO: 10690 - DNA, 22 bp, synthetic construct
  misc_feature 1..22: note = Synthetic construct
  source 1..22: mol_type = other DNA
aatacggagaggggtagtgcca

SEQ ID NO: 10691 - DNA, 22 bp, synthetic construct
  misc_feature 1..22: note = Synthetic construct
  source 1..22: mol_type = other DNA
atacggagaggggtagtgccac

SEQ ID NO: 10692 - DNA, 22 bp, synthetic construct
  misc_feature 1..22: note = Synthetic construct
  source 1..22: mol_type = other DNA
tacggagaggggtagtgccact

SEQ ID NO: 10693 - DNA, 22 bp, synthetic construct
  misc_feature 1..22: note = Synthetic construct
  source 1..22: mol_type = other DNA
acggagaggggtagtgccactg

SEQ ID NO: 10694 - DNA, 22 bp, synthetic construct
  misc_feature 1..22: note = Synthetic construct
  source 1..22: mol_type = other DNA
cggagaggggtagtgccactgt

SEQ ID NO: 10695 - DNA, 22 bp, synthetic construct
  misc_feature 1..22: note = Synthetic construct
  source 1..22: mol_type = other DNA
ggagaggggtagtgccactgtt

SEQ ID NO: 10696 - DNA, 22 bp, synthetic construct
  misc_feature 1..22: note = Synthetic construct
  source 1..22: mol_type = other DNA
gagaggggtagtgccactgttt

SEQ ID NO: 10697 - DNA, 22 bp, synthetic construct
  misc_feature 1..22: note = Synthetic construct
  source 1..22: mol_type = other DNA
agaggggtagtgccactgtttc

SEQ ID NO: 10698 - DNA, 22 bp, synthetic construct
  misc_feature 1..22: note = Synthetic construct
  source 1..22: mol_type = other DNA
gaggggtagtgccactgtttcg

SEQ ID NO: 10699 - DNA, 22 bp, synthetic construct
  misc_feature 1..22: note = Synthetic construct
  source 1..22: mol_type = other DNA
aggggtagtgccactgtttcgt

SEQ ID NO: 10700 - DNA, 22 bp, synthetic construct
  misc_feature 1..22: note = Synthetic construct
  source 1..22: mol_type = other DNA
ggggtagtgccactgtttcgtt

SEQ ID NO: 10701 - DNA, 22 bp, synthetic construct
  misc_feature 1..22: note = Synthetic construct
  source 1..22: mol_type = other DNA
gggtagtgccactgtttcgttt

SEQ ID NO: 10702 - DNA, 22 bp, synthetic construct
  misc_feature 1..22: note = Synthetic construct
  source 1..22: mol_type = other DNA
ggtagtgccactgtttcgtttt

SEQ ID NO: 10703 - DNA, 22 bp, synthetic construct
  misc_feature 1..22: note = Synthetic construct
  source 1..22: mol_type = other DNA
gtagtgccactgtttcgttttg

SEQ ID NO: 10704 - DNA, 22 bp, synthetic construct
  misc_feature 1..22: note = Synthetic construct
  source 1..22: mol_type = other DNA
tagtgccactgtttcgttttgg

SEQ ID NO: 10705 - DNA, 22 bp, synthetic construct
  misc_feature 1..22: note = Synthetic construct
  source 1..22: mol_type = other DNA
agtgccactgtttcgttttggc

SEQ ID NO: 10706 - DNA, 22 bp, synthetic construct
  misc_feature 1..22: note = Synthetic construct
  source 1..22: mol_type = other DNA
gtgccactgtttcgttttggcc

SEQ ID NO: 10707 - DNA, 22 bp, synthetic construct
  misc_feature 1..22: note = Synthetic construct
  source 1..22: mol_type = other DNA
tgccactgtttcgttttggccc

SEQ ID NO: 10708 - DNA, 22 bp, synthetic construct
  misc_feature 1..22: note = Synthetic construct
  source 1..22: mol_type = other DNA
gccactgtttcgttttggcccc

SEQ ID NO: 10709 - DNA, 22 bp, synthetic construct
  misc_feature 1..22: note = Synthetic construct
  source 1..22: mol_type = other DNA
ccactgtttcgttttggcccca

SEQ ID NO: 10710 - DNA, 22 bp, synthetic construct
  misc_feature 1..22: note = Synthetic construct
  source 1..22: mol_type = other DNA
cactgtttcgttttggccccag

SEQ ID NO: 10711 - DNA, 22 bp, synthetic construct
  misc_feature 1..22: note = Synthetic construct
  source 1..22: mol_type = other DNA
actgtttcgttttggccccagt

SEQ ID NO: 10712 - DNA, 22 bp, synthetic construct
  misc_feature 1..22: note = Synthetic construct
  source 1..22: mol_type = other DNA
ctgtttcgttttggccccagtc

SEQ ID NO: 10713 - DNA, 22 bp, synthetic construct
  misc_feature 1..22: note = Synthetic construct
  source 1..22: mol_type = other DNA
tgtttcgttttggccccagtcg

SEQ ID NO: 10714 - DNA, 22 bp, synthetic construct
  misc_feature 1..22: note = Synthetic construct
  source 1..22: mol_type = other DNA
gtttcgttttggccccagtcga

SEQ ID NO: 10715 - DNA, 22 bp, synthetic construct
  misc_feature 1..22: note = Synthetic construct
  source 1..22: mol_type = other DNA
tttcgttttggccccagtcgag

SEQ ID NO: 10716 - DNA, 22 bp, synthetic construct
  misc_feature 1..22: note = Synthetic construct
  source 1..22: mol_type = other DNA
ttcgttttggccccagtcgagt

SEQ ID NO: 10717 - DNA, 22 bp, synthetic construct
  misc_feature 1..22: note = Synthetic construct
  source 1..22: mol_type = other DNA
tcgttttggccccagtcgagtt

SEQ ID NO: 10718 - DNA, 22 bp, synthetic construct
  misc_feature 1..22: note = Synthetic construct
  source 1..22: mol_type = other DNA
cgttttggccccagtcgagtta

SEQ ID NO: 10719 - DNA, 22 bp, synthetic construct
  misc_feature 1..22: note = Synthetic construct
  source 1..22: mol_type = other DNA
gttttggccccagtcgagttaa

SEQ ID NO: 10720 - DNA, 22 bp, synthetic construct
  misc_feature 1..22: note = Synthetic construct
  source 1..22: mol_type = other DNA
ttttggccccagtcgagttaaa

SEQ ID NO: 10721 - DNA, 22 bp, synthetic construct
  misc_feature 1..22: note = Synthetic construct
  source 1..22: mol_type = other DNA
tttggccccagtcgagttaaaa

SEQ ID NO: 10722 - DNA, 22 bp, synthetic construct
  misc_feature 1..22: note = Synthetic construct
  source 1..22: mol_type = other DNA
ttggccccagtcgagttaaaac

SEQ ID NO: 10723 - DNA, 22 bp, synthetic construct
  misc_feature 1..22: note = Synthetic construct
  source 1..22: mol_type = other DNA
tggccccagtcgagttaaaacg

SEQ ID NO: 10724 - DNA, 22 bp, synthetic construct
  misc_feature 1..22: note = Synthetic construct
  source 1..22: mol_type = other DNA
ggccccagtcgagttaaaacga

SEQ ID NO: 10725 - DNA, 22 bp, synthetic construct
  misc_feature 1..22: note = Synthetic construct
  source 1..22: mol_type = other DNA
gccccagtcgagttaaaacgac

SEQ ID NO: 10726 - DNA, 22 bp, synthetic construct
  misc_feature 1..22: note = Synthetic construct
  source 1..22: mol_type = other DNA
ccccagtcgagttaaaacgacc

SEQ ID NO: 10727 - DNA, 22 bp, synthetic construct
  misc_feature 1..22: note = Synthetic construct
  source 1..22: mol_type = other DNA
cccagtcgagttaaaacgaccg

SEQ ID NO: 10728 - DNA, 22 bp, synthetic construct
  misc_feature 1..22: note = Synthetic construct
  source 1..22: mol_type = other DNA
ccagtcgagttaaaacgaccgg

SEQ ID NO: 10729 - DNA, 22 bp, synthetic construct
  misc_feature 1..22: note = Synthetic construct
  source 1..22: mol_type = other DNA
cagtcgagttaaaacgaccggg

SEQ ID NO: 10730 - DNA, 22 bp, synthetic construct
  misc_feature 1..22: note = Synthetic construct
  source 1..22: mol_type = other DNA
agtcgagttaaaacgaccggga

SEQ ID NO: 10731 - DNA, 22 bp, synthetic construct
  misc_feature 1..22: note = Synthetic construct
  source 1..22: mol_type = other DNA
gtcgagttaaaacgaccgggag

SEQ ID NO: 10732 - DNA, 22 bp, synthetic construct
  misc_feature 1..22: note = Synthetic construct
  source 1..22: mol_type = other DNA
tcgagttaaaacgaccgggagt

SEQ ID NO: 10733 - DNA, 22 bp, synthetic construct
  misc_feature 1..22: note = Synthetic construct
  source 1..22: mol_type = other DNA
cgagttaaaacgaccgggagtc

SEQ ID NO: 10734 - DNA, 22 bp, synthetic construct
  misc_feature 1..22: note = Synthetic construct
  source 1..22: mol_type = other DNA
gagttaaaacgaccgggagtcc

SEQ ID NO: 10735 - DNA, 22 bp, synthetic construct
  misc_feature 1..22: note = Synthetic construct
  source 1..22: mol_type = other DNA
agttaaaacgaccgggagtcca

SEQ ID NO: 10736 - DNA, 22 bp, synthetic construct
  misc_feature 1..22: note = Synthetic construct
  source 1..22: mol_type = other DNA
gttaaaacgaccgggagtccag

SEQ ID NO: 10737 - DNA, 22 bp, synthetic construct
  misc_feature 1..22: note = Synthetic construct
  source 1..22: mol_type = other DNA
ttaaaacgaccgggagtccagt

SEQ ID NO: 10738 - DNA, 22 bp, synthetic construct
  misc_feature 1..22: note = Synthetic construct
  source 1..22: mol_type = other DNA
taaaacgaccgggagtccagtt

SEQ ID NO: 10739 - DNA, 22 bp, synthetic construct
  misc_feature 1..22: note = Synthetic construct
  source 1..22: mol_type = other DNA
aaaacgaccgggagtccagttc

SEQ ID NO: 10740 - DNA, 22 bp, synthetic construct
  misc_feature 1..22: note = Synthetic construct
  source 1..22: mol_type = other DNA
aaacgaccgggagtccagttcg

SEQ ID NO: 10741 - DNA, 22 bp, synthetic construct
  misc_feature 1..22: note = Synthetic construct
  source 1..22: mol_type = other DNA
aacgaccgggagtccagttcga

SEQ ID NO: 10742 - DNA, 22 bp, synthetic construct
  misc_feature 1..22: note = Synthetic construct
  source 1..22: mol_type = other DNA
acgaccgggagtccagttcgaa

SEQ ID NO: 10743 - DNA, 22 bp, synthetic construct
  misc_feature 1..22: note = Synthetic construct
  source 1..22: mol_type = other DNA
cgaccgggagtccagttcgaac

SEQ ID NO: 10744 - DNA, 22 bp, synthetic construct
  misc_feature 1..22: note = Synthetic construct
  source 1..22: mol_type = other DNA
gaccgggagtccagttcgaacg

SEQ ID NO: 10745 - DNA, 22 bp, synthetic construct
  misc_feature 1..22: note = Synthetic construct
  source 1..22: mol_type = other DNA
accgggagtccagttcgaacga

SEQ ID NO: 10746 - DNA, 22 bp, synthetic construct
  misc_feature 1..22: note = Synthetic construct
  source 1..22: mol_type = other DNA
ccgggagtccagttcgaacgat

SEQ ID NO: 10747 - DNA, 22 bp, synthetic construct
  misc_feature 1..22: note = Synthetic construct
  source 1..22: mol_type = other DNA
cgggagtccagttcgaacgata

SEQ ID NO: 10748 - DNA, 22 bp, synthetic construct
  misc_feature 1..22: note = Synthetic construct
  source 1..22: mol_type = other DNA
gggagtccagttcgaacgatat

SEQ ID NO: 10749 - DNA, 22 bp, synthetic construct
  misc_feature 1..22: note = Synthetic construct
  source 1..22: mol_type = other DNA
ggagtccagttcgaacgatatt

SEQ ID NO: 10750 - DNA, 22 bp, synthetic construct
  misc_feature 1..22: note = Synthetic construct
  source 1..22: mol_type = other DNA
gagtccagttcgaacgatattt

SEQ ID NO: 10751 - DNA, 22 bp, synthetic construct
  misc_feature 1..22: note = Synthetic construct
  source 1..22: mol_type = other DNA
agtccagttcgaacgatatttt

SEQ ID NO: 10752 - DNA, 22 bp, synthetic construct
  misc_feature 1..22: note = Synthetic construct
  source 1..22: mol_type = other DNA
gtccagttcgaacgatatttta

SEQ ID NO: 10753 - DNA, 22 bp, synthetic construct
  misc_feature 1..22: note = Synthetic construct
  source 1..22: mol_type = other DNA
tccagttcgaacgatattttaa

SEQ ID NO: 10754 - DNA, 22 bp, synthetic construct
  misc_feature 1..22: note = Synthetic construct
  source 1..22: mol_type = other DNA
ccagttcgaacgatattttaaa

SEQ ID NO: 10755 - DNA, 22 bp, synthetic construct
  misc_feature 1..22: note = Synthetic construct
  source 1..22: mol_type = other DNA
cagttcgaacgatattttaaag

SEQ ID NO: 10756 - DNA, 22 bp, synthetic construct
  misc_feature 1..22: note = Synthetic construct
  source 1..22: mol_type = other DNA
agttcgaacgatattttaaaga

SEQ ID NO: 10757 - DNA, 22 bp, synthetic construct
  misc_feature 1..22: note = Synthetic construct
  source 1..22: mol_type = other DNA
gttcgaacgatattttaaagag

SEQ ID NO: 10758 - DNA, 22 bp, synthetic construct
  misc_feature 1..22: note = Synthetic construct
  source 1..22: mol_type = other DNA
ttcgaacgatattttaaagaga

SEQ ID NO: 10759 - DNA, 22 bp, synthetic construct
  misc_feature 1..22: note = Synthetic construct
  source 1..22: mol_type = other DNA
tcgaacgatattttaaagagaa

SEQ ID NO: 10760 - DNA, 22 bp, synthetic construct
  misc_feature 1..22: note = Synthetic construct
  source 1..22: mol_type = other DNA
cgaacgatattttaaagagaat

SEQ ID NO: 10761 - DNA, 22 bp, synthetic construct
  misc_feature 1..22: note = Synthetic construct
  source 1..22: mol_type = other DNA
gaacgatattttaaagagaatg

SEQ ID NO: 10762 - DNA, 22 bp, synthetic construct
  misc_feature 1..22: note = Synthetic construct
  source 1..22: mol_type = other DNA
aacgatattttaaagagaatga

SEQ ID NO: 10763 - DNA, 22 bp, synthetic construct
  misc_feature 1..22: note = Synthetic construct
  source 1..22: mol_type = other DNA
acgatattttaaagagaatgag

SEQ ID NO: 10764 - DNA, 22 bp, synthetic construct
  misc_feature 1..22: note = Synthetic construct
  source 1..22: mol_type = other DNA
cgatattttaaagagaatgagt

SEQ ID NO: 10765 - DNA, 22 bp, synthetic construct
  misc_feature 1..22: note = Synthetic construct
  source 1..22: mol_type = other DNA
gatattttaaagagaatgagtt

SEQ ID NO: 10766 - DNA, 22 bp, synthetic construct
  misc_feature 1..22: note = Synthetic construct
  source 1..22: mol_type = other DNA
atattttaaagagaatgagtta

SEQ ID NO: 10767 - DNA, 22 bp, synthetic construct
  misc_feature 1..22: note = Synthetic construct
  source 1..22: mol_type = other DNA
tattttaaagagaatgagttat

SEQ ID NO: 10768 - DNA, 22 bp, synthetic construct
  misc_feature 1..22: note = Synthetic construct
  source 1..22: mol_type = other DNA
attttaaagagaatgagttatc

SEQ ID NO: 10769 - DNA, 22 bp, synthetic construct
  misc_feature 1..22: note = Synthetic construct
  source 1..22: mol_type = other DNA
ttttaaagagaatgagttatct

SEQ ID NO: 10770 - DNA, 22 bp, synthetic construct
  misc_feature 1..22: note = Synthetic construct
  source 1..22: mol_type = other DNA
tttaaagagaatgagttatctt

SEQ ID NO: 10771 - DNA, 22 bp, synthetic construct
  misc_feature 1..22: note = Synthetic construct
  source 1..22: mol_type = other DNA
ttaaagagaatgagttatcttc

SEQ ID NO: 10772 - DNA, 22 bp, synthetic construct
  misc_feature 1..22: note = Synthetic construct
  source 1..22: mol_type = other DNA
taaagagaatgagttatcttca

SEQ ID NO: 10773 - DNA, 22 bp, synthetic construct
  misc_feature 1..22: note = Synthetic construct
  source 1..22: mol_type = other DNA
aaagagaatgagttatcttcag

SEQ ID NO: 10774 - DNA, 22 bp, synthetic construct
  misc_feature 1..22: note = Synthetic construct
  source 1..22: mol_type = other DNA
aagagaatgagttatcttcagt

SEQ ID NO: 10775 - DNA, 22 bp, synthetic construct
  misc_feature 1..22: note = Synthetic construct
  source 1..22: mol_type = other DNA
agagaatgagttatcttcagtc

SEQ ID NO: 10776 - DNA, 22 bp, synthetic construct
  misc_feature 1..22: note = Synthetic construct
  source 1..22: mol_type = other DNA
gagaatgagttatcttcagtct

SEQ ID NO: 10777 - DNA, 22 bp, synthetic construct
  misc_feature 1..22: note = Synthetic construct
  source 1..22: mol_type = other DNA
agaatgagttatcttcagtctc

SEQ ID NO: 10778 - DNA, 22 bp, synthetic construct
  misc_feature 1..22: note = Synthetic construct
  source 1..22: mol_type = other DNA
gaatgagttatcttcagtctca

SEQ ID NO: 10779 - DNA, 22 bp, synthetic construct
  misc_feature 1..22: note = Synthetic construct
  source 1..22: mol_type = other DNA
aatgagttatcttcagtctcac

SEQ ID NO: 10780 - DNA, 22 bp, synthetic construct
  misc_feature 1..22: note = Synthetic construct
  source 1..22: mol_type = other DNA
atgagttatcttcagtctcacc

SEQ ID NO: 10781 - DNA, 22 bp, synthetic construct
  misc_feature 1..22: note = Synthetic construct
  source 1..22: mol_type = other DNA
tgagttatcttcagtctcaccg

SEQ ID NO: 10782 - DNA, 22 bp, synthetic construct
  misc_feature 1..22: note = Synthetic construct
  source 1..22: mol_type = other DNA
gagttatcttcagtctcaccgt

SEQ ID NO: 10783 - DNA, 22 bp, synthetic construct
  misc_feature 1..22: note = Synthetic construct
  source 1..22: mol_type = other DNA
agttatcttcagtctcaccgtc

SEQ ID NO: 10784 - DNA, 22 bp, synthetic construct
  misc_feature 1..22: note = Synthetic construct
  source 1..22: mol_type = other DNA
gttatcttcagtctcaccgtcc

SEQ ID NO: 10785 - DNA, 22 bp, synthetic construct
  misc_feature 1..22: note = Synthetic construct
  source 1..22: mol_type = other DNA
ttatcttcagtctcaccgtccg

SEQ ID NO: 10786 - DNA, 22 bp, synthetic construct
  misc_feature 1..22: note = Synthetic construct
  source 1..22: mol_type = other DNA
tatcttcagtctcaccgtccgc

SEQ ID NO: 10787 - DNA, 22 bp, synthetic construct
  misc_feature 1..22: note = Synthetic construct
  source 1..22: mol_type = other DNA
atcttcagtctcaccgtccgcg

SEQ ID NO: 10788 - DNA, 22 bp, synthetic construct
  misc_feature 1..22: note = Synthetic construct
  source 1..22: mol_type = other DNA
tcttcagtctcaccgtccgcgt

SEQ ID NO: 10789 - DNA, 22 bp, synthetic construct
  misc_feature 1..22: note = Synthetic construct
  source 1..22: mol_type = other DNA
cttcagtctcaccgtccgcgta

SEQ ID NO: 10790 - DNA, 22 bp, synthetic construct
  misc_feature 1..22: note = Synthetic construct
  source 1..22: mol_type = other DNA
ttcagtctcaccgtccgcgtaa

SEQ ID NO: 10791 - DNA, 22 bp, synthetic construct
  misc_feature 1..22: note = Synthetic construct
  source 1..22: mol_type = other DNA
tcagtctcaccgtccgcgtaaa

SEQ ID NO: 10792 - DNA, 22 bp, synthetic construct
  misc_feature 1..22: note = Synthetic construct
  source 1..22: mol_type = other DNA
cagtctcaccgtccgcgtaaac

SEQ ID NO: 10793 - DNA, 22 bp, synthetic construct
  misc_feature 1..22: note = Synthetic construct
  source 1..22: mol_type = other DNA
agtctcaccgtccgcgtaaacg

SEQ ID NO: 10794 - DNA, 22 bp, synthetic construct
  misc_feature 1..22: note = Synthetic construct
  source 1..22: mol_type = other DNA
gtctcaccgtccgcgtaaacgc

SEQ ID NO: 10795 - DNA, 22 bp, synthetic construct
  misc_feature 1..22: note = Synthetic construct
  source 1..22: mol_type = other DNA
tctcaccgtccgcgtaaacgcg

SEQ ID NO: 10796 - DNA, 22 bp, synthetic construct
  misc_feature 1..22: note = Synthetic construct
  source 1..22: mol_type = other DNA
ctcaccgtccgcgtaaacgcga

SEQ ID NO: 10797 - DNA, 22 bp, synthetic construct
  misc_feature 1..22: note = Synthetic construct
  source 1..22: mol_type = other DNA
tcaccgtccgcgtaaacgcgaa

SEQ ID NO: 10798 - DNA, 22 bp, synthetic construct
  misc_feature 1..22: note = Synthetic construct
  source 1..22: mol_type = other DNA
caccgtccgcgtaaacgcgaac

SEQ ID NO: 10799 - DNA, 22 bp, synthetic construct
  misc_feature 1..22: note = Synthetic construct
  source 1..22: mol_type = other DNA
accgtccgcgtaaacgcgaacg

SEQ ID NO: 10800 - DNA, 22 bp, synthetic construct
  misc_feature 1..22: note = Synthetic construct
  source 1..22: mol_type = other DNA
ccgtccgcgtaaacgcgaacgg

SEQ ID NO: 10801 - DNA, 22 bp, synthetic construct
  misc_feature 1..22: note = Synthetic construct
  source 1..22: mol_type = other DNA
cgtccgcgtaaacgcgaacgga

SEQ ID NO: 10802 - DNA, 22 bp, synthetic construct
  misc_feature 1..22: note = Synthetic construct
  source 1..22: mol_type = other DNA
gtccgcgtaaacgcgaacggag

SEQ ID NO: 10803 - DNA, 22 bp, synthetic construct
  misc_feature 1..22: note = Synthetic construct
  source 1..22: mol_type = other DNA
tccgcgtaaacgcgaacggagg

SEQ ID NO: 10804 - DNA, 22 bp, synthetic construct
  misc_feature 1..22: note = Synthetic construct
  source 1..22: mol_type = other DNA
ccgcgtaaacgcgaacggaggg

SEQ ID NO: 10805 - DNA, 22 bp, synthetic construct
  misc_feature 1..22: note = Synthetic construct
  source 1..22: mol_type = other DNA
cgcgtaaacgcgaacggagggg

SEQ ID NO: 10806 - DNA, 22 bp, synthetic construct
  misc_feature 1..22: note = Synthetic construct
  source 1..22: mol_type = other DNA
gcgtaaacgcgaacggagggga

SEQ ID NO: 10807 - DNA, 22 bp, synthetic construct
  misc_feature 1..22: note = Synthetic construct
  source 1..22: mol_type = other DNA
cgtaaacgcgaacggaggggac

SEQ ID NO: 10808 - DNA, 22 bp, synthetic construct
  misc_feature 1..22: note = Synthetic construct
  source 1..22: mol_type = other DNA
gtaaacgcgaacggaggggacg

SEQ ID NO: 10809 - DNA, 22 bp, synthetic construct
  misc_feature 1..22: note = Synthetic construct
  source 1..22: mol_type = other DNA
taaacgcgaacggaggggacga

SEQ ID NO: 10810 - DNA, 22 bp, synthetic construct
  misc_feature 1..22: note = Synthetic construct
  source 1..22: mol_type = other DNA
aaacgcgaacggaggggacgaa

SEQ ID NO: 10811 - DNA, 22 bp, synthetic construct
  misc_feature 1..22: note = Synthetic construct
  source 1..22: mol_type = other DNA
aacgcgaacggaggggacgaag

SEQ ID NO: 10812 - DNA, 22 bp, synthetic construct
  misc_feature 1..22: note = Synthetic construct
  source 1..22: mol_type = other DNA
acgcgaacggaggggacgaagg

SEQ ID NO: 10813 - DNA, 22 bp, synthetic construct
  misc_feature 1..22: note = Synthetic construct
  source 1..22: mol_type = other DNA
cgcgaacggaggggacgaaggt

SEQ ID NO: 10814 - DNA, 22 bp, synthetic construct
  misc_feature 1..22: note = Synthetic construct
  source 1..22: mol_type = other DNA
gcgaacggaggggacgaaggtc

SEQ ID NO: 10815 - DNA, 22 bp, synthetic construct
  misc_feature 1..22: note = Synthetic construct
  source 1..22: mol_type = other DNA
cgaacggaggggacgaaggtct

SEQ ID NO: 10816 - DNA, 22 bp, synthetic construct
  misc_feature 1..22: note = Synthetic construct
  source 1..22: mol_type = other DNA
gaacggaggggacgaaggtctc

SEQ ID NO: 10817 - DNA, 22 bp, synthetic construct
  misc_feature 1..22: note = Synthetic construct
  source 1..22: mol_type = other DNA
aacggaggggacgaaggtctcg

SEQ ID NO: 10818 - DNA, 22 bp, synthetic construct
  misc_feature 1..22: note = Synthetic construct
  source 1..22: mol_type = other DNA
acggaggggacgaaggtctcgt

SEQ ID NO: 10819 - DNA, 22 bp, synthetic construct
  misc_feature 1..22: note = Synthetic construct
  source 1..22: mol_type = other DNA
cggaggggacgaaggtctcgtt

SEQ ID NO: 10820 - DNA, 22 bp, synthetic construct
  misc_feature 1..22: note = Synthetic construct
  source 1..22: mol_type = other DNA
ggaggggacgaaggtctcgttc

SEQ ID NO: 10821 - DNA, 22 bp, synthetic construct
  misc_feature 1..22: note = Synthetic construct
  source 1..22: mol_type = other DNA
gaggggacgaaggtctcgttct

SEQ ID NO: 10822 - DNA, 22 bp, synthetic construct
  misc_feature 1..22: note = Synthetic construct
  source 1..22: mol_type = other DNA
aggggacgaaggtctcgttctc

SEQ ID NO: 10823 - DNA, 22 bp, synthetic construct
  misc_feature 1..22: note = Synthetic construct
  source 1..22: mol_type = other DNA
ggggacgaaggtctcgttctcc

SEQ ID NO: 10824 - DNA, 22 bp, synthetic construct
  misc_feature 1..22: note = Synthetic construct
  source 1..22: mol_type = other DNA
gggacgaaggtctcgttctccc

SEQ ID NO: 10825 - DNA, 22 bp, synthetic construct
  misc_feature 1..22: note = Synthetic construct
  source 1..22: mol_type = other DNA
ggacgaaggtctcgttctccct

SEQ ID NO: 10826 - DNA, 22 bp, synthetic construct
  misc_feature 1..22: note = Synthetic construct
  source 1..22: mol_type = other DNA
gacgaaggtctcgttctcccta

SEQ ID NO: 10827 - DNA, 22 bp, synthetic construct
  misc_feature 1..22: note = Synthetic construct
  source 1..22: mol_type = other DNA
acgaaggtctcgttctccctat

SEQ ID NO: 10828 - DNA, 22 bp, synthetic construct
  misc_feature 1..22: note = Synthetic construct
  source 1..22: mol_type = other DNA
cgaaggtctcgttctccctatc

SEQ ID NO: 10829 - DNA, 22 bp, synthetic construct
  misc_feature 1..22: note = Synthetic construct
  source 1..22: mol_type = other DNA
gaaggtctcgttctccctatca

SEQ ID NO: 10830 - DNA, 22 bp, synthetic construct
  misc_feature 1..22: note = Synthetic construct
  source 1..22: mol_type = other DNA
aaggtctcgttctccctatcaa

SEQ ID NO: 10831 - DNA, 22 bp, synthetic construct
  misc_feature 1..22: note = Synthetic construct
  source 1..22: mol_type = other DNA
aggtctcgttctccctatcaag

SEQ ID NO: 10832 - DNA, 22 bp, synthetic construct
  misc_feature 1..22: note = Synthetic construct
  source 1..22: mol_type = other DNA
ggtctcgttctccctatcaagg

SEQ ID NO: 10833 - DNA, 22 bp, synthetic construct
  misc_feature 1..22: note = Synthetic construct
  source 1..22: mol_type = other DNA
gtctcgttctccctatcaaggg

SEQ ID NO: 10834 - DNA, 22 bp, synthetic construct
  misc_feature 1..22: note = Synthetic construct
  source 1..22: mol_type = other DNA
tctcgttctccctatcaagggt

SEQ ID NO: 10835 - DNA, 22 bp, synthetic construct
  misc_feature 1..22: note = Synthetic construct
  source 1..22: mol_type = other DNA
ctcgttctccctatcaagggta

SEQ ID NO: 10836 - DNA, 22 bp, synthetic construct
  misc_feature 1..22: note = Synthetic construct
  source 1..22: mol_type = other DNA
tcgttctccctatcaagggtac

SEQ ID NO: 10837 - DNA, 22 bp, synthetic construct
  misc_feature 1..22: note = Synthetic construct
  source 1..22: mol_type = other DNA
cgttctccctatcaagggtact

SEQ ID NO: 10838 - DNA, 22 bp, synthetic construct
  misc_feature 1..22: note = Synthetic construct
  source 1..22: mol_type = other DNA
gttctccctatcaagggtacta

SEQ ID NO: 10839 - DNA, 22 bp, synthetic construct
  misc_feature 1..22: note = Synthetic construct
  source 1..22: mol_type = other DNA
ttctccctatcaagggtactaa

SEQ ID NO: 10840 - DNA, 22 bp, synthetic construct
  misc_feature 1..22: note = Synthetic construct
  source 1..22: mol_type = other DNA
tctccctatcaagggtactaaa

SEQ ID NO: 10841 - DNA, 22 bp, synthetic construct
  misc_feature 1..22: note = Synthetic construct
  source 1..22: mol_type = other DNA
ctccctatcaagggtactaaaa

SEQ ID NO: 10842 - DNA, 22 bp, synthetic construct
  misc_feature 1..22: note = Synthetic construct
  source 1..22: mol_type = other DNA
tccctatcaagggtactaaaag

SEQ ID NO: 10843 - DNA, 22 bp, synthetic construct
  misc_feature 1..22: note = Synthetic construct
  source 1..22: mol_type = other DNA
ccctatcaagggtactaaaagc

SEQ ID NO: 10844 - DNA, 22 bp, synthetic construct
  misc_feature 1..22: note = Synthetic construct
  source 1..22: mol_type = other DNA
cctatcaagggtactaaaagct

SEQ ID NO: 10845 - DNA, 22 bp, synthetic construct
  misc_feature 1..22: note = Synthetic construct
  source 1..22: mol_type = other DNA
ctatcaagggtactaaaagctc

SEQ ID NO: 10846 - DNA, 22 bp, synthetic construct
  misc_feature 1..22: note = Synthetic construct
  source 1..22: mol_type = other DNA
tatcaagggtactaaaagctcg

SEQ ID NO: 10847 - DNA, 22 bp, synthetic construct
  misc_feature 1..22: note = Synthetic construct
  source 1..22: mol_type = other DNA
atcaagggtactaaaagctcgc

SEQ ID NO: 10848 - DNA, 22 bp, synthetic construct
  misc_feature 1..22: note = Synthetic construct
  source 1..22: mol_type = other DNA
tcaagggtactaaaagctcgca

SEQ ID NO: 10849 - DNA, 22 bp, synthetic construct
  misc_feature 1..22: note = Synthetic construct
  source 1..22: mol_type = other DNA
caagggtactaaaagctcgcac

SEQ ID NO: 10850 - DNA, 22 bp, synthetic construct
  misc_feature 1..22: note = Synthetic construct
  source 1..22: mol_type = other DNA
aagggtactaaaagctcgcaca

SEQ ID NO: 10851 - DNA, 22 bp, synthetic construct
  misc_feature 1..22: note = Synthetic construct
  source 1..22: mol_type = other DNA
agggtactaaaagctcgcacag

SEQ ID NO: 10852 - DNA, 22 bp, synthetic construct
  misc_feature 1..22: note = Synthetic construct
  source 1..22: mol_type = other DNA
gggtactaaaagctcgcacagg

SEQ ID NO: 10853 - DNA, 22 bp, synthetic construct
  misc_feature 1..22: note = Synthetic construct
  source 1..22: mol_type = other DNA
ggtactaaaagctcgcacaggt

SEQ ID NO: 10854 - DNA, 22 bp, synthetic construct
  misc_feature 1..22: note = Synthetic construct
  source 1..22: mol_type = other DNA
gtactaaaagctcgcacaggtc

SEQ ID NO: 10855 - DNA, 22 bp, synthetic construct
  misc_feature 1..22: note = Synthetic construct
  source 1..22: mol_type = other DNA
tactaaaagctcgcacaggtca

SEQ ID NO: 10856 - DNA, 22 bp, synthetic construct
  misc_feature 1..22: note = Synthetic construct
  source 1..22: mol_type = other DNA
actaaaagctcgcacaggtcaa

SEQ ID NO: 10857 - DNA, 22 bp, synthetic construct
  misc_feature 1..22: note = Synthetic construct
  source 1..22: mol_type = other DNA
ctaaaagctcgcacaggtcaaa

SEQ ID NO: 10858 - DNA, 22 bp, synthetic construct
  misc_feature 1..22: note = Synthetic construct
  source 1..22: mol_type = other DNA
taaaagctcgcacaggtcaaac

SEQ ID NO: 10859 - DNA, 22 bp, synthetic construct
  misc_feature 1..22: note = Synthetic construct
  source 1..22: mol_type = other DNA
aaaagctcgcacaggtcaaacc

SEQ ID NO: 10860 - DNA, 22 bp, synthetic construct
  misc_feature 1..22: note = Synthetic construct
  source 1..22: mol_type = other DNA
aaagctcgcacaggtcaaacct

SEQ ID NO: 10861 - DNA, 22 bp, synthetic construct
  misc_feature 1..22: note = Synthetic construct
  source 1..22: mol_type = other DNA
aagctcgcacaggtcaaacctc

SEQ ID NO: 10862 - DNA, 22 bp, synthetic construct
  misc_feature 1..22: note = Synthetic construct
  source 1..22: mol_type = other DNA
agctcgcacaggtcaaacctcc

SEQ ID NO: 10863 - DNA, 22 bp, synthetic construct
  misc_feature 1..22: note = Synthetic construct
  source 1..22: mol_type = other DNA
gctcgcacaggtcaaacctcct

SEQ ID NO: 10864 - DNA, 22 bp, synthetic construct
  misc_feature 1..22: note = Synthetic construct
  source 1..22: mol_type = other DNA
ctcgcacaggtcaaacctccta

SEQ ID NO: 10865 - DNA, 22 bp, synthetic construct
  misc_feature 1..22: note = Synthetic construct
  source 1..22: mol_type = other DNA
tcgcacaggtcaaacctcctag

SEQ ID NO: 10866 - DNA, 22 bp, synthetic construct
  misc_feature 1..22: note = Synthetic construct
  source 1..22: mol_type = other DNA
cgcacaggtcaaacctcctagg

SEQ ID NO: 10867 - DNA, 22 bp, synthetic construct
  misc_feature 1..22: note = Synthetic construct
  source 1..22: mol_type = other DNA
gcacaggtcaaacctcctagga

SEQ ID NO: 10868 - DNA, 22 bp, synthetic construct
  misc_feature 1..22: note = Synthetic construct
  source 1..22: mol_type = other DNA
cacaggtcaaacctcctaggaa

SEQ ID NO: 10869 - DNA, 22 bp, synthetic construct
  misc_feature 1..22: note = Synthetic construct
  source 1..22: mol_type = other DNA
acaggtcaaacctcctaggaat

SEQ ID NO: 10870 - DNA, 22 bp, synthetic construct
  misc_feature 1..22: note = Synthetic construct
  source 1..22: mol_type = other DNA
caggtcaaacctcctaggaatg

SEQ ID NO: 10871 - DNA, 22 bp, synthetic construct
  misc_feature 1..22: note = Synthetic construct
  source 1..22: mol_type = other DNA
aggtcaaacctcctaggaatgg

SEQ ID NO: 10872 - DNA, 22 bp, synthetic construct
  misc_feature 1..22: note = Synthetic construct
  source 1..22: mol_type = other DNA
ggtcaaacctcctaggaatgga

SEQ ID NO: 10873 - DNA, 22 bp, synthetic construct
  misc_feature 1..22: note = Synthetic construct
  source 1..22: mol_type = other DNA
gtcaaacctcctaggaatggaa

SEQ ID NO: 10874 - DNA, 22 bp, synthetic construct
  misc_feature 1..22: note = Synthetic construct
  source 1..22: mol_type = other DNA
tcaaacctcctaggaatggaat

SEQ ID NO: 10875 - DNA, 22 bp, synthetic construct
  misc_feature 1..22: note = Synthetic construct
  source 1..22: mol_type = other DNA
caaacctcctaggaatggaatt

SEQ ID NO: 10876 - DNA, 22 bp, synthetic construct
  misc_feature 1..22: note = Synthetic construct
  source 1..22: mol_type = other DNA
aaacctcctaggaatggaattc

SEQ ID NO: 10877 - DNA, 22 bp, synthetic construct
  misc_feature 1..22: note = Synthetic construct
  source 1..22: mol_type = other DNA
aacctcctaggaatggaattcc

SEQ ID NO: 10878 - DNA, 22 bp, synthetic construct
  misc_feature 1..22: note = Synthetic construct
  source 1..22: mol_type = other DNA
acctcctaggaatggaattccg

SEQ ID NO: 10879 - DNA, 22 bp, synthetic construct
  misc_feature 1..22: note = Synthetic construct
  source 1..22: mol_type = other DNA
cctcctaggaatggaattccgg

SEQ ID NO: 10880 - DNA, 22 bp, synthetic construct
  misc_feature 1..22: note = Synthetic construct
  source 1..22: mol_type = other DNA
ctcctaggaatggaattccggc

SEQ ID NO: 10881 - DNA, 22 bp, synthetic construct
  misc_feature 1..22: note = Synthetic construct
  source 1..22: mol_type = other DNA
tcctaggaatggaattccggct

SEQ ID NO: 10882 - DNA, 22 bp, synthetic construct
  misc_feature 1..22: note = Synthetic construct
  source 1..22: mol_type = other DNA
cctaggaatggaattccggcta

SEQ ID NO: 10883 - DNA, 22 bp, synthetic construct
  misc_feature 1..22: note = Synthetic construct
  source 1..22: mol_type = other DNA
ctaggaatggaattccggctac

SEQ ID NO: 10884 - DNA, 22 bp, synthetic construct
  misc_feature 1..22: note = Synthetic construct
  source 1..22: mol_type = other DNA
taggaatggaattccggctacc

SEQ ID NO: 10885 - DNA, 22 bp, synthetic construct
  misc_feature 1..22: note = Synthetic construct
  source 1..22: mol_type = other DNA
aggaatggaattccggctacct

SEQ ID NO: 10886 - DNA, 22 bp, synthetic construct
  misc_feature 1..22: note = Synthetic construct
  source 1..22: mol_type = other DNA
ggaatggaattccggctaccta

SEQ ID NO: 10887 - DNA, 22 bp, synthetic construct
  misc_feature 1..22: note = Synthetic construct
  source 1..22: mol_type = other DNA
gaatggaattccggctacctac

SEQ ID NO: 10888 - DNA, 22 bp, synthetic construct
  misc_feature 1..22: note = Synthetic construct
  source 1..22: mol_type = other DNA
aatggaattccggctacctaca

SEQ ID NO: 10889 - DNA, 22 bp, synthetic construct
  misc_feature 1..22: note = Synthetic construct
  source 1..22: mol_type = other DNA
atggaattccggctacctacag

SEQ ID NO: 10890 - DNA, 22 bp, synthetic construct
  misc_feature 1..22: note = Synthetic construct
  source 1..22: mol_type = other DNA
tggaattccggctacctacagc

SEQ ID NO: 10891 - DNA, 22 bp, synthetic construct
  misc_feature 1..22: note = Synthetic construct
  source 1..22: mol_type = other DNA
ggaattccggctacctacagcg

SEQ ID NO: 10892 - DNA, 22 bp, synthetic construct
  misc_feature 1..22: note = Synthetic construct
  source 1..22: mol_type = other DNA
gaattccggctacctacagcga

SEQ ID NO: 10893 - DNA, 22 bp, synthetic construct
  misc_feature 1..22: note = Synthetic construct
  source 1..22: mol_type = other DNA
aattccggctacctacagcgat

SEQ ID NO: 10894 - DNA, 22 bp, synthetic construct
  misc_feature 1..22: note = Synthetic construct
  source 1..22: mol_type = other DNA
attccggctacctacagcgata

SEQ ID NO: 10895 - DNA, 22 bp, synthetic construct
  misc_feature 1..22: note = Synthetic construct
  source 1..22: mol_type = other DNA
ttccggctacctacagcgatag

SEQ ID NO: 10896 - DNA, 22 bp, synthetic construct
  misc_feature 1..22: note = Synthetic construct
  source 1..22: mol_type = other DNA
tccggctacctacagcgatagc

SEQ ID NO: 10897 - DNA, 22 bp, synthetic construct
  misc_feature 1..22: note = Synthetic construct
  source 1..22: mol_type = other DNA
ccggctacctacagcgatagcc

SEQ ID NO: 10898 - DNA, 22 bp, synthetic construct
  misc_feature 1..22: note = Synthetic construct
  source 1..22: mol_type = other DNA
cggctacctacagcgatagcca

SEQ ID NO: 10899 - DNA, 22 bp, synthetic construct
  misc_feature 1..22: note = Synthetic construct
  source 1..22: mol_type = other DNA
ggctacctacagcgatagccat

SEQ ID NO: 10900 - DNA, 22 bp, synthetic construct
  misc_feature 1..22: note = Synthetic construct
  source 1..22: mol_type = other DNA
gctacctacagcgatagccatg

SEQ ID NO: 10901 - DNA, 22 bp, synthetic construct
  misc_feature 1..22: note = Synthetic construct
  source 1..22: mol_type = other DNA
ctacctacagcgatagccatgg

SEQ ID NO: 10902 - DNA, 22 bp, synthetic construct
  misc_feature 1..22: note = Synthetic construct
  source 1..22: mol_type = other DNA
tacctacagcgatagccatggt

SEQ ID NO: 10903 - DNA, 22 bp, synthetic construct
  misc_feature 1..22: note = Synthetic construct
  source 1..22: mol_type = other DNA
acctacagcgatagccatggta

SEQ ID NO: 10904 - DNA, 22 bp, synthetic construct
  misc_feature 1..22: note = Synthetic construct
  source 1..22: mol_type = other DNA
cctacagcgatagccatggtag

SEQ ID NO: 10905 - DNA, 22 bp, synthetic construct
  misc_feature 1..22: note = Synthetic construct
  source 1..22: mol_type = other DNA
ctacagcgatagccatggtagc

SEQ ID NO: 10906 - DNA, 22 bp, synthetic construct
  misc_feature 1..22: note = Synthetic construct
  source 1..22: mol_type = other DNA
tacagcgatagccatggtagcg

SEQ ID NO: 10907 - DNA, 22 bp, synthetic construct
  misc_feature 1..22: note = Synthetic construct
  source 1..22: mol_type = other DNA
acagcgatagccatggtagcgt

SEQ ID NO: 10908 - DNA, 22 bp, synthetic construct
  misc_feature 1..22: note = Synthetic construct
  source 1..22: mol_type = other DNA
cagcgatagccatggtagcgtc

SEQ ID NO: 10909 - DNA, 22 bp, synthetic construct
  misc_feature 1..22: note = Synthetic construct
  source 1..22: mol_type = other DNA
agcgatagccatggtagcgtct

SEQ ID NO: 10910 - DNA, 22 bp, synthetic construct
  misc_feature 1..22: note = Synthetic construct
  source 1..22: mol_type = other DNA
gcgatagccatggtagcgtctc

SEQ ID NO: 10911 - DNA, 22 bp, synthetic construct
  misc_feature 1..22: note = Synthetic construct
  source 1..22: mol_type = other DNA
cgatagccatggtagcgtctcg

SEQ ID NO: 10912 - DNA, 22 bp, synthetic construct
  misc_feature 1..22: note = Synthetic construct
  source 1..22: mol_type = other DNA
gatagccatggtagcgtctcgc

SEQ ID NO: 10913 - DNA, 22 bp, synthetic construct
  misc_feature 1..22: note = Synthetic construct
  source 1..22: mol_type = other DNA
atagccatggtagcgtctcgct

SEQ ID NO: 10914 - DNA, 22 bp, synthetic construct
  misc_feature 1..22: note = Synthetic construct
  source 1..22: mol_type = other DNA
tagccatggtagcgtctcgcta

SEQ ID NO: 10915 - DNA, 22 bp, synthetic construct
  misc_feature 1..22: note = Synthetic construct
  source 1..22: mol_type = other DNA
agccatggtagcgtctcgctaa

SEQ ID NO: 10916 - DNA, 22 bp, synthetic construct
  misc_feature 1..22: note = Synthetic construct
  source 1..22: mol_type = other DNA
gccatggtagcgtctcgctaaa

SEQ ID NO: 10917 - DNA, 22 bp, synthetic construct
  misc_feature 1..22: note = Synthetic construct
  source 1..22: mol_type = other DNA
ccatggtagcgtctcgctaaag

SEQ ID NO: 10918 - DNA, 22 bp, synthetic construct
  misc_feature 1..22: note = Synthetic construct
  source 1..22: mol_type = other DNA
catggtagcgtctcgctaaaga

SEQ ID NO: 10919 - DNA, 22 bp, synthetic construct
  misc_feature 1..22: note = Synthetic construct
  source 1..22: mol_type = other DNA
atggtagcgtctcgctaaagac

SEQ ID NO: 10920 - DNA, 22 bp, synthetic construct
  misc_feature 1..22: note = Synthetic construct
  source 1..22: mol_type = other DNA
tggtagcgtctcgctaaagaca

SEQ ID NO: 10921 - DNA, 22 bp, synthetic construct
  misc_feature 1..22: note = Synthetic construct
  source 1..22: mol_type = other DNA
ggtagcgtctcgctaaagacat

SEQ ID NO: 10922 - DNA, 22 bp, synthetic construct
  misc_feature 1..22: note = Synthetic construct
  source 1..22: mol_type = other DNA
gtagcgtctcgctaaagacatt

SEQ ID NO: 10923 - DNA, 22 bp, synthetic construct
  misc_feature 1..22: note = Synthetic construct
  source 1..22: mol_type = other DNA
tagcgtctcgctaaagacatta

SEQ ID NO: 10924 - DNA, 22 bp, synthetic construct
  misc_feature 1..22: note = Synthetic construct
  source 1..22: mol_type = other DNA
agcgtctcgctaaagacattaa

SEQ ID NO: 10925 - DNA, 22 bp, synthetic construct
  misc_feature 1..22: note = Synthetic construct
  source 1..22: mol_type = other DNA
gcgtctcgctaaagacattaaa

SEQ ID NO: 10926 - DNA, 22 bp, synthetic construct
  misc_feature 1..22: note = Synthetic construct
  source 1..22: mol_type = other DNA
cgtctcgctaaagacattaaaa

SEQ ID NO: 10927 - DNA, 22 bp, synthetic construct
  misc_feature 1..22: note = Synthetic construct
  source 1..22: mol_type = other DNA
gtctcgctaaagacattaaaaa

SEQ ID NO: 10928 - DNA, 22 bp, synthetic construct
  misc_feature 1..22: note = Synthetic construct
  source 1..22: mol_type = other DNA
tctcgctaaagacattaaaaat

SEQ ID NO: 10929 - DNA, 22 bp, synthetic construct
  misc_feature 1..22: note = Synthetic construct
  source 1..22: mol_type = other DNA
ctcgctaaagacattaaaaatg

SEQ ID NO: 10930 - DNA, 22 bp, synthetic construct
  misc_feature 1..22: note = Synthetic construct
  source 1..22: mol_type = other DNA
tcgctaaagacattaaaaatgg

SEQ ID NO: 10931 - DNA, 22 bp, synthetic construct
  misc_feature 1..22: note = Synthetic construct
  source 1..22: mol_type = other DNA
cgctaaagacattaaaaatggc

SEQ ID NO: 10932 - DNA, 22 bp, synthetic construct
  misc_feature 1..22: note = Synthetic construct
  source 1..22: mol_type = other DNA
gctaaagacattaaaaatggca

SEQ ID NO: 10933 - DNA, 22 bp, synthetic construct
  misc_feature 1..22: note = Synthetic construct
  source 1..22: mol_type = other DNA
ctaaagacattaaaaatggcat

SEQ ID NO: 10934 - DNA, 22 bp, synthetic construct
  misc_feature 1..22: note = Synthetic construct
  source 1..22: mol_type = other DNA
taaagacattaaaaatggcatt

SEQ ID NO: 10935 - DNA, 22 bp, synthetic construct
  misc_feature 1..22: note = Synthetic construct
  source 1..22: mol_type = other DNA
aaagacattaaaaatggcatta

SEQ ID NO: 10936 - DNA, 22 bp, synthetic construct
  misc_feature 1..22: note = Synthetic construct
  source 1..22: mol_type = other DNA
aagacattaaaaatggcattag

SEQ ID NO: 10937 - DNA, 22 bp, synthetic construct
  misc_feature 1..22: note = Synthetic construct
  source 1..22: mol_type = other DNA
agacattaaaaatggcattagc

SEQ ID NO: 10938 - DNA, 22 bp, synthetic construct
  misc_feature 1..22: note = Synthetic construct
  source 1..22: mol_type = other DNA
gacattaaaaatggcattagct

SEQ ID NO: 10939 - DNA, 22 bp, synthetic construct
  misc_feature 1..22: note = Synthetic construct
  source 1..22: mol_type = other DNA
acattaaaaatggcattagctc

SEQ ID NO: 10940 - DNA, 22 bp, synthetic construct
  misc_feature 1..22: note = Synthetic construct
  source 1..22: mol_type = other DNA
cattaaaaatggcattagctcg

SEQ ID NO: 10941 - DNA, 22 bp, synthetic construct
  misc_feature 1..22: note = Synthetic construct
  source 1..22: mol_type = other DNA
attaaaaatggcattagctcga

SEQ ID NO: 10942 - DNA, 22 bp, synthetic construct
  misc_feature 1..22: note = Synthetic construct
  source 1..22: mol_type = other DNA
ttaaaaatggcattagctcgac

SEQ ID NO: 10943 - DNA, 22 bp, synthetic construct
  misc_feature 1..22: note = Synthetic construct
  source 1..22: mol_type = other DNA
taaaaatggcattagctcgaca

SEQ ID NO: 10944 - DNA, 22 bp, synthetic construct
  misc_feature 1..22: note = Synthetic construct
  source 1..22: mol_type = other DNA
aaaaatggcattagctcgacag

SEQ ID NO: 10945 - DNA, 22 bp, synthetic construct
  misc_feature 1..22: note = Synthetic construct
  source 1..22: mol_type = other DNA
aaaatggcattagctcgacagg

SEQ ID NO: 10946 - DNA, 22 bp, synthetic construct
  misc_feature 1..22: note = Synthetic construct
  source 1..22: mol_type = other DNA
aaatggcattagctcgacagga

SEQ ID NO: 10947 - DNA, 22 bp, synthetic construct
  misc_feature 1..22: note = Synthetic construct
  source 1..22: mol_type = other DNA
aatggcattagctcgacaggaa

SEQ ID NO: 10948 - DNA, 22 bp, synthetic construct
  misc_feature 1..22: note = Synthetic construct
  source 1..22: mol_type = other DNA
atggcattagctcgacaggaag

SEQ ID NO: 10949 - DNA, 22 bp, synthetic construct
  misc_feature 1..22: note = Synthetic construct
  source 1..22: mol_type = other DNA
tggcattagctcgacaggaagt

SEQ ID NO: 10950 - DNA, 22 bp, synthetic construct
  misc_feature 1..22: note = Synthetic construct
  source 1..22: mol_type = other DNA
ggcattagctcgacaggaagtt

SEQ ID NO: 10951 - DNA, 22 bp, synthetic construct
  misc_feature 1..22: note = Synthetic construct
  source 1..22: mol_type = other DNA
gcattagctcgacaggaagttg

SEQ ID NO: 10952 - DNA, 22 bp, synthetic construct
  misc_feature 1..22: note = Synthetic construct
  source 1..22: mol_type = other DNA
cattagctcgacaggaagttga

SEQ ID NO: 10953 - DNA, 22 bp, synthetic construct
  misc_feature 1..22: note = Synthetic construct
  source 1..22: mol_type = other DNA
attagctcgacaggaagttgag

SEQ ID NO: 10954 - DNA, 22 bp, synthetic construct
  misc_feature 1..22: note = Synthetic construct
  source 1..22: mol_type = other DNA
ttagctcgacaggaagttgagc

SEQ ID NO: 10955 - DNA, 22 bp, synthetic construct
  misc_feature 1..22: note = Synthetic construct
  source 1..22: mol_type = other DNA
tagctcgacaggaagttgagca

SEQ ID NO: 10956 - DNA, 22 bp, synthetic construct
  misc_feature 1..22: note = Synthetic construct
  source 1..22: mol_type = other DNA
agctcgacaggaagttgagcag

SEQ ID NO: 10957 - DNA, 22 bp, synthetic construct
  misc_feature 1..22: note = Synthetic construct
  source 1..22: mol_type = other DNA
gctcgacaggaagttgagcagg

SEQ ID NO: 10958 - DNA, 22 bp, synthetic construct
  misc_feature 1..22: note = Synthetic construct
  source 1..22: mol_type = other DNA
ctcgacaggaagttgagcagga

SEQ ID NO: 10959 - DNA, 22 bp, synthetic construct
  misc_feature 1..22: note = Synthetic construct
  source 1..22: mol_type = other DNA
tcgacaggaagttgagcaggac

SEQ ID NO: 10960 - DNA, 22 bp, synthetic construct
  misc_feature 1..22: note = Synthetic construct
  source 1..22: mol_type = other DNA
cgacaggaagttgagcaggacc

SEQ ID NO: 10961 - DNA, 22 bp, synthetic construct
  misc_feature 1..22: note = Synthetic construct
  source 1..22: mol_type = other DNA
gacaggaagttgagcaggaccc

SEQ ID NO: 10962 - DNA, 22 bp, synthetic construct
  misc_feature 1..22: note = Synthetic construct
  source 1..22: mol_type = other DNA
acaggaagttgagcaggacccc

SEQ ID NO: 10963 - DNA, 22 bp, synthetic construct
  misc_feature 1..22: note = Synthetic construct
  source 1..22: mol_type = other DNA
caggaagttgagcaggaccccg

SEQ ID NO: 10964 - DNA, 22 bp, synthetic construct
  misc_feature 1..22: note = Synthetic construct
  source 1..22: mol_type = other DNA
aggaagttgagcaggaccccga

SEQ ID NO: 10965 - DNA, 22 bp, synthetic construct
  misc_feature 1..22: note = Synthetic construct
  source 1..22: mol_type = other DNA
ggaagttgagcaggaccccgaa

SEQ ID NO: 10966 - DNA, 22 bp, synthetic construct
  misc_feature 1..22: note = Synthetic construct
  source 1..22: mol_type = other DNA
gaagttgagcaggaccccgaaa

SEQ ID NO: 10967 - DNA, 22 bp, synthetic construct
  misc_feature 1..22: note = Synthetic construct
  source 1..22: mol_type = other DNA
aagttgagcaggaccccgaaag

SEQ ID NO: 10968 - DNA, 22 bp, synthetic construct
  misc_feature 1..22: note = Synthetic construct
  source 1..22: mol_type = other DNA
agttgagcaggaccccgaaagg

SEQ ID NO: 10969 - DNA, 22 bp, synthetic construct
  misc_feature 1..22: note = Synthetic construct
  source 1..22: mol_type = other DNA
gttgagcaggaccccgaaaggg

SEQ ID NO: 10970 - DNA, 22 bp, synthetic construct
  misc_feature 1..22: note = Synthetic construct
  source 1..22: mol_type = other DNA
ttgagcaggaccccgaaagggg

SEQ ID NO: 10971 - DNA, 22 bp, synthetic construct
  misc_feature 1..22: note = Synthetic construct
  source 1..22: mol_type = other DNA
tgagcaggaccccgaaaggggt

SEQ ID NO: 10972 - DNA, 22 bp, synthetic construct
  misc_feature 1..22: note = Synthetic construct
  source 1..22: mol_type = other DNA
gagcaggaccccgaaaggggtc

SEQ ID NO: 10973 - DNA, 22 bp, synthetic construct
  misc_feature 1..22: note = Synthetic construct
  source 1..22: mol_type = other DNA
agcaggaccccgaaaggggtcc

SEQ ID NO: 10974 - DNA, 22 bp, synthetic construct
  misc_feature 1..22: note = Synthetic construct
  source 1..22: mol_type = other DNA
gcaggaccccgaaaggggtccc

SEQ ID NO: 10975 - DNA, 22 bp, synthetic construct
  misc_feature 1..22: note = Synthetic construct
  source 1..22: mol_type = other DNA
caggaccccgaaaggggtccca

SEQ ID NO: 10976 - DNA, 22 bp, synthetic construct
  misc_feature 1..22: note = Synthetic construct
  source 1..22: mol_type = other DNA
aggaccccgaaaggggtcccac

SEQ ID NO: 10977 - DNA, 22 bp, synthetic construct
  misc_feature 1..22: note = Synthetic construct
  source 1..22: mol_type = other DNA
ggaccccgaaaggggtcccacc

SEQ ID NO: 10978 - DNA, 23 bp, synthetic construct
  misc_feature 1..23: note = Synthetic construct
  source 1..23: mol_type = other DNA
tgggtggtaactagccaagcagc

SEQ ID NO: 10979 - DNA, 23 bp, synthetic construct
  misc_feature 1..23: note = Synthetic construct
  source 1..23: mol_type = other DNA
gggtggtaactagccaagcagct

SEQ ID NO: 10980 - DNA, 23 bp, synthetic construct
  misc_feature 1..23: note = Synthetic construct
  source 1..23: mol_type = other DNA
ggtggtaactagccaagcagcta

SEQ ID NO: 10981 - DNA, 23 bp, synthetic construct
  misc_feature 1..23: note = Synthetic construct
  source 1..23: mol_type = other DNA
gtggtaactagccaagcagctag

SEQ ID NO: 10982 - DNA, 23 bp, synthetic construct
  misc_feature 1..23: note = Synthetic construct
  source 1..23: mol_type = other DNA
tggtaactagccaagcagctagt

SEQ ID NO: 10983 - DNA, 23 bp, synthetic construct
  misc_feature 1..23: note = Synthetic construct
  source 1..23: mol_type = other DNA
ggtaactagccaagcagctagtt

SEQ ID NO: 10984 - DNA, 23 bp, synthetic construct
  misc_feature 1..23: note = Synthetic construct
  source 1..23: mol_type = other DNA
gtaactagccaagcagctagtta

SEQ ID NO: 10985 - DNA, 23 bp, synthetic construct
  misc_feature 1..23: note = Synthetic construct
  source 1..23: mol_type = other DNA
taactagccaagcagctagttac

SEQ ID NO: 10986 - DNA, 23 bp, synthetic construct
  misc_feature 1..23: note = Synthetic construct
  source 1..23: mol_type = other DNA
aactagccaagcagctagttacc

SEQ ID NO: 10987 - DNA, 23 bp, synthetic construct
  misc_feature 1..23: note = Synthetic construct
  source 1..23: mol_type = other DNA
actagccaagcagctagttacca

SEQ ID NO: 10988 - DNA, 23 bp, synthetic construct
  misc_feature 1..23: note = Synthetic construct
  source 1..23: mol_type = other DNA
ctagccaagcagctagttaccaa

SEQ ID NO: 10989 - DNA, 23 bp, synthetic construct
  misc_feature 1..23: note = Synthetic construct
  source 1..23: mol_type = other DNA
tagccaagcagctagttaccaaa

SEQ ID NO: 10990 - DNA, 23 bp, synthetic construct
  misc_feature 1..23: note = Synthetic construct
  source 1..23: mol_type = other DNA
agccaagcagctagttaccaaat

SEQ ID NO: 10991 - DNA, 23 bp, synthetic construct
  misc_feature 1..23: note = Synthetic construct
  source 1..23: mol_type = other DNA
gccaagcagctagttaccaaatc

SEQ ID NO: 10992 - DNA, 23 bp, synthetic construct
  misc_feature 1..23: note = Synthetic construct
  source 1..23: mol_type = other DNA
ccaagcagctagttaccaaatcg

SEQ ID NO: 10993 - DNA, 23 bp, synthetic construct
  misc_feature 1..23: note = Synthetic construct
  source 1..23: mol_type = other DNA
caagcagctagttaccaaatcgg

SEQ ID NO: 10994 - DNA, 23 bp, synthetic construct
  misc_feature 1..23: note = Synthetic construct
  source 1..23: mol_type = other DNA
aagcagctagttaccaaatcggg

SEQ ID NO: 10995 - DNA, 23 bp, synthetic construct
  misc_feature 1..23: note = Synthetic construct
  source 1..23: mol_type = other DNA
agcagctagttaccaaatcggga

SEQ ID NO: 10996 - DNA, 23 bp, synthetic construct
  misc_feature 1..23: note = Synthetic construct
  source 1..23: mol_type = other DNA
gcagctagttaccaaatcgggag

SEQ ID NO: 10997 - DNA, 23 bp, synthetic construct
  misc_feature 1..23: note = Synthetic construct
  source 1..23: mol_type = other DNA
cagctagttaccaaatcgggaga

SEQ ID NO: 10998 - DNA, 23 bp, synthetic construct
  misc_feature 1..23: note = Synthetic construct
  source 1..23: mol_type = other DNA
agctagttaccaaatcgggagaa

SEQ ID NO: 10999 - DNA, 23 bp, synthetic construct
  misc_feature 1..23: note = Synthetic construct
  source 1..23: mol_type = other DNA
gctagttaccaaatcgggagaat

SEQ ID NO: 11000 - DNA, 23 bp, synthetic construct
  misc_feature 1..23: note = Synthetic construct
  source 1..23: mol_type = other DNA
ctagttaccaaatcgggagaatc

SEQ ID NO: 11001 - DNA, 23 bp, synthetic construct
  misc_feature 1..23: note = Synthetic construct
  source 1..23: mol_type = other DNA
tagttaccaaatcgggagaatcc

SEQ ID NO: 11002 - DNA, 23 bp, synthetic construct
  misc_feature 1..23: note = Synthetic construct
  source 1..23: mol_type = other DNA
agttaccaaatcgggagaatccc

SEQ ID NO: 11003 - DNA, 23 bp, synthetic construct
  misc_feature 1..23: note = Synthetic construct
  source 1..23: mol_type = other DNA
gttaccaaatcgggagaatcccg

SEQ ID NO: 11004 - DNA, 23 bp, synthetic construct
  misc_feature 1..23: note = Synthetic construct
  source 1..23: mol_type = other DNA
ttaccaaatcgggagaatcccgg

SEQ ID NO: 11005 - DNA, 23 bp, synthetic construct
  misc_feature 1..23: note = Synthetic construct
  source 1..23: mol_type = other DNA
taccaaatcgggagaatcccggg

SEQ ID NO: 11006 - DNA, 23 bp, synthetic construct
  misc_feature 1..23: note = Synthetic construct
  source 1..23: mol_type = other DNA
accaaatcgggagaatcccgggt

SEQ ID NO: 11007 - DNA, 23 bp, synthetic construct
  misc_feature 1..23: note = Synthetic construct
  source 1..23: mol_type = other DNA
ccaaatcgggagaatcccgggtc

SEQ ID NO: 11008 - DNA, 23 bp, synthetic construct
  misc_feature 1..23: note = Synthetic construct
  source 1..23: mol_type = other DNA
caaatcgggagaatcccgggtcc

SEQ ID NO: 11009 - DNA, 23 bp, synthetic construct
  misc_feature 1..23: note = Synthetic construct
  source 1..23: mol_type = other DNA
aaatcgggagaatcccgggtcct

SEQ ID NO: 11010 - DNA, 23 bp, synthetic construct
  misc_feature 1..23: note = Synthetic construct
  source 1..23: mol_type = other DNA
aatcgggagaatcccgggtcctc

SEQ ID NO: 11011 - DNA, 23 bp, synthetic construct
  misc_feature 1..23: note = Synthetic construct
  source 1..23: mol_type = other DNA
atcgggagaatcccgggtcctct

SEQ ID NO: 11012 - DNA, 23 bp, synthetic construct
  misc_feature 1..23: note = Synthetic construct
  source 1..23: mol_type = other DNA
tcgggagaatcccgggtcctctc

SEQ ID NO: 11013 - DNA, 23 bp, synthetic construct
  misc_feature 1..23: note = Synthetic construct
  source 1..23: mol_type = other DNA
cgggagaatcccgggtcctctct

SEQ ID NO: 11014 - DNA, 23 bp, synthetic construct
  misc_feature 1..23: note = Synthetic construct
  source 1..23: mol_type = other DNA
gggagaatcccgggtcctctctt

SEQ ID NO: 11015 - DNA, 23 bp, synthetic construct
  misc_feature 1..23: note = Synthetic construct
  source 1..23: mol_type = other DNA
ggagaatcccgggtcctctcttt

SEQ ID NO: 11016 - DNA, 23 bp, synthetic construct
  misc_feature 1..23: note = Synthetic construct
  source 1..23: mol_type = other DNA
gagaatcccgggtcctctcttta

SEQ ID NO: 11017 - DNA, 23 bp, synthetic construct
  misc_feature 1..23: note = Synthetic construct
  source 1..23: mol_type = other DNA
agaatcccgggtcctctctttag

SEQ ID NO: 11018 - DNA, 23 bp, synthetic construct
  misc_feature 1..23: note = Synthetic construct
  source 1..23: mol_type = other DNA
gaatcccgggtcctctctttagg

SEQ ID NO: 11019 - DNA, 23 bp, synthetic construct
  misc_feature 1..23: note = Synthetic construct
  source 1..23: mol_type = other DNA
aatcccgggtcctctctttaggg

SEQ ID NO: 11020 - DNA, 23 bp, synthetic construct
  misc_feature 1..23: note = Synthetic construct
  source 1..23: mol_type = other DNA
atcccgggtcctctctttagggg

SEQ ID NO: 11021 - DNA, 23 bp, synthetic construct
  misc_feature 1..23: note = Synthetic construct
  source 1..23: mol_type = other DNA
tcccgggtcctctctttaggggg

SEQ ID NO: 11022 - DNA, 23 bp, synthetic construct
  misc_feature 1..23: note = Synthetic construct
  source 1..23: mol_type = other DNA
cccgggtcctctctttaggggga

SEQ ID NO: 11023 - DNA, 23 bp, synthetic construct
  misc_feature 1..23: note = Synthetic construct
  source 1..23: mol_type = other DNA
ccgggtcctctctttagggggag

SEQ ID NO: 11024 - DNA, 23 bp, synthetic construct
  misc_feature 1..23: note = Synthetic construct
  source 1..23: mol_type = other DNA
cgggtcctctctttagggggagg

SEQ ID NO: 11025 - DNA, 23 bp, synthetic construct
  misc_feature 1..23: note = Synthetic construct
  source 1..23: mol_type = other DNA
gggtcctctctttagggggaggt

SEQ ID NO: 11026 - DNA, 23 bp, synthetic construct
  misc_feature 1..23: note = Synthetic construct
  source 1..23: mol_type = other DNA
ggtcctctctttagggggaggtc

SEQ ID NO: 11027 - DNA, 23 bp, synthetic construct
  misc_feature 1..23: note = Synthetic construct
  source 1..23: mol_type = other DNA
gtcctctctttagggggaggtcc

SEQ ID NO: 11028 - DNA, 23 bp, synthetic construct
  misc_feature 1..23: note = Synthetic construct
  source 1..23: mol_type = other DNA
tcctctctttagggggaggtccc

SEQ ID NO: 11029 - DNA, 23 bp, synthetic construct
  misc_feature 1..23: note = Synthetic construct
  source 1..23: mol_type = other DNA
cctctctttagggggaggtccct

SEQ ID NO: 11030 - DNA, 23 bp, synthetic construct
  misc_feature 1..23: note = Synthetic construct
  source 1..23: mol_type = other DNA
ctctctttagggggaggtccctg

SEQ ID NO: 11031 - DNA, 23 bp, synthetic construct
  misc_feature 1..23: note = Synthetic construct
  source 1..23: mol_type = other DNA
tctctttagggggaggtccctgg

SEQ ID NO: 11032 - DNA, 23 bp, synthetic construct
  misc_feature 1..23: note = Synthetic construct
  source 1..23: mol_type = other DNA
ctctttagggggaggtccctggg

SEQ ID NO: 11033 - DNA, 23 bp, synthetic construct
  misc_feature 1..23: note = Synthetic construct
  source 1..23: mol_type = other DNA
tctttagggggaggtccctgggc

SEQ ID NO: 11034 - DNA, 23 bp, synthetic construct
  misc_feature 1..23: note = Synthetic construct
  source 1..23: mol_type = other DNA
ctttagggggaggtccctgggcc

SEQ ID NO: 11035 - DNA, 23 bp, synthetic construct
  misc_feature 1..23: note = Synthetic construct
  source 1..23: mol_type = other DNA
tttagggggaggtccctgggccg

SEQ ID NO: 11036 - DNA, 23 bp, synthetic construct
  misc_feature 1..23: note = Synthetic construct
  source 1..23: mol_type = other DNA
ttagggggaggtccctgggccga

SEQ ID NO: 11037 - DNA, 23 bp, synthetic construct
  misc_feature 1..23: note = Synthetic construct
  source 1..23: mol_type = other DNA
tagggggaggtccctgggccgaa

SEQ ID NO: 11038 - DNA, 23 bp, synthetic construct
  misc_feature 1..23: note = Synthetic construct
  source 1..23: mol_type = other DNA
agggggaggtccctgggccgaag

SEQ ID NO: 11039 - DNA, 23 bp, synthetic construct
  misc_feature 1..23: note = Synthetic construct
  source 1..23: mol_type = other DNA
gggggaggtccctgggccgaagc

SEQ ID NO: 11040 - DNA, 23 bp, synthetic construct
  misc_feature 1..23: note = Synthetic construct
  source 1..23: mol_type = other DNA
ggggaggtccctgggccgaagcc

SEQ ID NO: 11041 - DNA, 23 bp, synthetic construct
  misc_feature 1..23: note = Synthetic construct
  source 1..23: mol_type = other DNA
gggaggtccctgggccgaagccc

SEQ ID NO: 11042 - DNA, 23 bp, synthetic construct
  misc_feature 1..23: note = Synthetic construct
  source 1..23: mol_type = other DNA
ggaggtccctgggccgaagcccg

SEQ ID NO: 11043 - DNA, 23 bp, synthetic construct
  misc_feature 1..23: note = Synthetic construct
  source 1..23: mol_type = other DNA
gaggtccctgggccgaagcccgc

SEQ ID NO: 11044 - DNA, 23 bp, synthetic construct
  misc_feature 1..23: note = Synthetic construct
  source 1..23: mol_type = other DNA
aggtccctgggccgaagcccgcc

SEQ ID NO: 11045 - DNA, 23 bp, synthetic construct
  misc_feature 1..23: note = Synthetic construct
  source 1..23: mol_type = other DNA
ggtccctgggccgaagcccgccc

SEQ ID NO: 11046 - DNA, 23 bp, synthetic construct
  misc_feature 1..23: note = Synthetic construct
  source 1..23: mol_type = other DNA
gtccctgggccgaagcccgccca

SEQ ID NO: 11047 - DNA, 23 bp, synthetic construct
  misc_feature 1..23: note = Synthetic construct
  source 1..23: mol_type = other DNA
tccctgggccgaagcccgcccac

SEQ ID NO: 11048 - DNA, 23 bp, synthetic construct
  misc_feature 1..23: note = Synthetic construct
  source 1..23: mol_type = other DNA
ccctgggccgaagcccgcccacc

SEQ ID NO: 11049 - DNA, 23 bp, synthetic construct
  misc_feature 1..23: note = Synthetic construct
  source 1..23: mol_type = other DNA
cctgggccgaagcccgcccacct

SEQ ID NO: 11050 - DNA, 23 bp, synthetic construct
  misc_feature 1..23: note = Synthetic construct
  source 1..23: mol_type = other DNA
ctgggccgaagcccgcccacctt

SEQ ID NO: 11051 - DNA, 23 bp, synthetic construct
  misc_feature 1..23: note = Synthetic construct
  source 1..23: mol_type = other DNA
tgggccgaagcccgcccaccttt

SEQ ID NO: 11052 - DNA, 23 bp, synthetic construct
  misc_feature 1..23: note = Synthetic construct
  source 1..23: mol_type = other DNA
gggccgaagcccgcccacctttc

SEQ ID NO: 11053 - DNA, 23 bp, synthetic construct
  misc_feature 1..23: note = Synthetic construct
  source 1..23: mol_type = other DNA
ggccgaagcccgcccacctttcg

SEQ ID NO: 11054 - DNA, 23 bp, synthetic construct
  misc_feature 1..23: note = Synthetic construct
  source 1..23: mol_type = other DNA
gccgaagcccgcccacctttcgg

SEQ ID NO: 11055 - DNA, 23 bp, synthetic construct
  misc_feature 1..23: note = Synthetic construct
  source 1..23: mol_type = other DNA
ccgaagcccgcccacctttcggt

SEQ ID NO: 11056 - DNA, 23 bp, synthetic construct
  misc_feature 1..23: note = Synthetic construct
  source 1..23: mol_type = other DNA
cgaagcccgcccacctttcggtg

SEQ ID NO: 11057 - DNA, 23 bp, synthetic construct
  misc_feature 1..23: note = Synthetic construct
  source 1..23: mol_type = other DNA
gaagcccgcccacctttcggtgg

SEQ ID NO: 11058 - DNA, 23 bp, synthetic construct
  misc_feature 1..23: note = Synthetic construct
  source 1..23: mol_type = other DNA
aagcccgcccacctttcggtgga

SEQ ID NO: 11059 - DNA, 23 bp, synthetic construct
  misc_feature 1..23: note = Synthetic construct
  source 1..23: mol_type = other DNA
agcccgcccacctttcggtggag

SEQ ID NO: 11060 - DNA, 23 bp, synthetic construct
  misc_feature 1..23: note = Synthetic construct
  source 1..23: mol_type = other DNA
gcccgcccacctttcggtggagc

SEQ ID NO: 11061 - DNA, 23 bp, synthetic construct
  misc_feature 1..23: note = Synthetic construct
  source 1..23: mol_type = other DNA
cccgcccacctttcggtggagcc

SEQ ID NO: 11062 - DNA, 23 bp, synthetic construct
  misc_feature 1..23: note = Synthetic construct
  source 1..23: mol_type = other DNA
ccgcccacctttcggtggagccg

SEQ ID NO: 11063 - DNA, 23 bp, synthetic construct
  misc_feature 1..23: note = Synthetic construct
  source 1..23: mol_type = other DNA
cgcccacctttcggtggagccgg

SEQ ID NO: 11064 - DNA, 23 bp, synthetic construct
  misc_feature 1..23: note = Synthetic construct
  source 1..23: mol_type = other DNA
gcccacctttcggtggagccgga

SEQ ID NO: 11065 - DNA, 23 bp, synthetic construct
  misc_feature 1..23: note = Synthetic construct
  source 1..23: mol_type = other DNA
cccacctttcggtggagccggac

SEQ ID NO: 11066 - DNA, 23 bp, synthetic construct
  misc_feature 1..23: note = Synthetic construct
  source 1..23: mol_type = other DNA
ccacctttcggtggagccggacc

SEQ ID NO: 11067 - DNA, 23 bp, synthetic construct
  misc_feature 1..23: note = Synthetic construct
  source 1..23: mol_type = other DNA
cacctttcggtggagccggaccg

SEQ ID NO: 11068 - DNA, 23 bp, synthetic construct
  misc_feature 1..23: note = Synthetic construct
  source 1..23: mol_type = other DNA
acctttcggtggagccggaccgc

SEQ ID NO: 11069 - DNA, 23 bp, synthetic construct
  misc_feature 1..23: note = Synthetic construct
  source 1..23: mol_type = other DNA
cctttcggtggagccggaccgct

SEQ ID NO: 11070 - DNA, 23 bp, synthetic construct
  misc_feature 1..23: note = Synthetic construct
  source 1..23: mol_type = other DNA
ctttcggtggagccggaccgctt

SEQ ID NO: 11071 - DNA, 23 bp, synthetic construct
  misc_feature 1..23: note = Synthetic construct
  source 1..23: mol_type = other DNA
tttcggtggagccggaccgcttt

SEQ ID NO: 11072 - DNA, 23 bp, synthetic construct
  misc_feature 1..23: note = Synthetic construct
  source 1..23: mol_type = other DNA
ttcggtggagccggaccgctttc

SEQ ID NO: 11073 - DNA, 23 bp, synthetic construct
  misc_feature 1..23: note = Synthetic construct
  source 1..23: mol_type = other DNA
tcggtggagccggaccgctttcg

SEQ ID NO: 11074 - DNA, 23 bp, synthetic construct
  misc_feature 1..23: note = Synthetic construct
  source 1..23: mol_type = other DNA
cggtggagccggaccgctttcgc

SEQ ID NO: 11075 - DNA, 23 bp, synthetic construct
  misc_feature 1..23: note = Synthetic construct
  source 1..23: mol_type = other DNA
ggtggagccggaccgctttcgca

SEQ ID NO: 11076 - DNA, 23 bp, synthetic construct
  misc_feature 1..23: note = Synthetic construct
  source 1..23: mol_type = other DNA
gtggagccggaccgctttcgcac

SEQ ID NO: 11077 - DNA, 23 bp, synthetic construct
  misc_feature 1..23: note = Synthetic construct
  source 1..23: mol_type = other DNA
tggagccggaccgctttcgcacc

SEQ ID NO: 11078 - DNA, 23 bp, synthetic construct
  misc_feature 1..23: note = Synthetic construct
  source 1..23: mol_type = other DNA
ggagccggaccgctttcgcaccc

SEQ ID NO: 11079 - DNA, 23 bp, synthetic construct
  misc_feature 1..23: note = Synthetic construct
  source 1..23: mol_type = other DNA
gagccggaccgctttcgcacccg

SEQ ID NO: 11080 - DNA, 23 bp, synthetic construct
  misc_feature 1..23: note = Synthetic construct
  source 1..23: mol_type = other DNA
agccggaccgctttcgcacccgt

SEQ ID NO: 11081 - DNA, 23 bp, synthetic construct
  misc_feature 1..23: note = Synthetic construct
  source 1..23: mol_type = other DNA
gccggaccgctttcgcacccgtg

SEQ ID NO: 11082 - DNA, 23 bp, synthetic construct
  misc_feature 1..23: note = Synthetic construct
  source 1..23: mol_type = other DNA
ccggaccgctttcgcacccgtgc

SEQ ID NO: 11083 - DNA, 23 bp, synthetic construct
  misc_feature 1..23: note = Synthetic construct
  source 1..23: mol_type = other DNA
cggaccgctttcgcacccgtgct

SEQ ID NO: 11084 - DNA, 23 bp, synthetic construct
  misc_feature 1..23: note = Synthetic construct
  source 1..23: mol_type = other DNA
ggaccgctttcgcacccgtgctc

SEQ ID NO: 11085 - DNA, 23 bp, synthetic construct
  misc_feature 1..23: note = Synthetic construct
  source 1..23: mol_type = other DNA
gaccgctttcgcacccgtgctct

SEQ ID NO: 11086 - DNA, 23 bp, synthetic construct
  misc_feature 1..23: note = Synthetic construct
  source 1..23: mol_type = other DNA
accgctttcgcacccgtgctctt

SEQ ID NO: 11087 - DNA, 23 bp, synthetic construct
  misc_feature 1..23: note = Synthetic construct
  source 1..23: mol_type = other DNA
ccgctttcgcacccgtgctcttt

SEQ ID NO: 11088 - DNA, 23 bp, synthetic construct
  misc_feature 1..23: note = Synthetic construct
  source 1..23: mol_type = other DNA
cgctttcgcacccgtgctctttc

SEQ ID NO: 11089 - DNA, 23 bp, synthetic construct
  misc_feature 1..23: note = Synthetic construct
  source 1..23: mol_type = other DNA
gctttcgcacccgtgctctttcg

SEQ ID NO: 11090 - DNA, 23 bp, synthetic construct
  misc_feature 1..23: note = Synthetic construct
  source 1..23: mol_type = other DNA
ctttcgcacccgtgctctttcga

SEQ ID NO: 11091 - DNA, 23 bp, synthetic construct
  misc_feature 1..23: note = Synthetic construct
  source 1..23: mol_type = other DNA
tttcgcacccgtgctctttcgag

SEQ ID NO: 11092 - DNA, 23 bp, synthetic construct
  misc_feature 1..23: note = Synthetic construct
  source 1..23: mol_type = other DNA
ttcgcacccgtgctctttcgagc

SEQ ID NO: 11093 - DNA, 23 bp, synthetic construct
  misc_feature 1..23: note = Synthetic construct
  source 1..23: mol_type = other DNA
tcgcacccgtgctctttcgagca

SEQ ID NO: 11094 - DNA, 23 bp, synthetic construct
  misc_feature 1..23: note = Synthetic construct
  source 1..23: mol_type = other DNA
cgcacccgtgctctttcgagcac

SEQ ID NO: 11095 - DNA, 23 bp, synthetic construct
  misc_feature 1..23: note = Synthetic construct
  source 1..23: mol_type = other DNA
gcacccgtgctctttcgagcaca

SEQ ID NO: 11096 - DNA, 23 bp, synthetic construct
  misc_feature 1..23: note = Synthetic construct
  source 1..23: mol_type = other DNA
cacccgtgctctttcgagcacac

SEQ ID NO: 11097 - DNA, 23 bp, synthetic construct
  misc_feature 1..23: note = Synthetic construct
  source 1..23: mol_type = other DNA
acccgtgctctttcgagcacacc

SEQ ID NO: 11098 - DNA, 23 bp, synthetic construct
  misc_feature 1..23: note = Synthetic construct
  source 1..23: mol_type = other DNA
cccgtgctctttcgagcacaccc

SEQ ID NO: 11099 - DNA, 23 bp, synthetic construct
  misc_feature 1..23: note = Synthetic construct
  source 1..23: mol_type = other DNA
ccgtgctctttcgagcacaccca

SEQ ID NO: 11100 - DNA, 23 bp, synthetic construct
  misc_feature 1..23: note = Synthetic construct
  source 1..23: mol_type = other DNA
cgtgctctttcgagcacacccac

SEQ ID NO: 11101 - DNA, 23 bp, synthetic construct
  misc_feature 1..23: note = Synthetic construct
  source 1..23: mol_type = other DNA
gtgctctttcgagcacacccacc

SEQ ID NO: 11102 - DNA, 23 bp, synthetic construct
  misc_feature 1..23: note = Synthetic construct
  source 1..23: mol_type = other DNA
tgctctttcgagcacacccaccc

SEQ ID NO: 11103 - DNA, 23 bp, synthetic construct
  misc_feature 1..23: note = Synthetic construct
  source 1..23: mol_type = other DNA
gctctttcgagcacacccacccc

SEQ ID NO: 11104 - DNA, 23 bp, synthetic construct
  misc_feature 1..23: note = Synthetic construct
  source 1..23: mol_type = other DNA
ctctttcgagcacacccaccccg

SEQ ID NO: 11105 - DNA, 23 bp, synthetic construct
  misc_feature 1..23: note = Synthetic construct
  source 1..23: mol_type = other DNA
tctttcgagcacacccaccccgt

SEQ ID NO: 11106 - DNA, 23 bp, synthetic construct
  misc_feature 1..23: note = Synthetic construct
  source 1..23: mol_type = other DNA
ctttcgagcacacccaccccgtt

SEQ ID NO: 11107 - DNA, 23 bp, synthetic construct
  misc_feature 1..23: note = Synthetic construct
  source 1..23: mol_type = other DNA
tttcgagcacacccaccccgttt

SEQ ID NO: 11108 - DNA, 23 bp, synthetic construct
  misc_feature 1..23: note = Synthetic construct
  source 1..23: mol_type = other DNA
ttcgagcacacccaccccgttta

SEQ ID NO: 11109 - DNA, 23 bp, synthetic construct
  misc_feature 1..23: note = Synthetic construct
  source 1..23: mol_type = other DNA
tcgagcacacccaccccgtttac

SEQ ID NO: 11110 - DNA, 23 bp, synthetic construct
  misc_feature 1..23: note = Synthetic construct
  source 1..23: mol_type = other DNA
cgagcacacccaccccgtttacg

SEQ ID NO: 11111 - DNA, 23 bp, synthetic construct
  misc_feature 1..23: note = Synthetic construct
  source 1..23: mol_type = other DNA
gagcacacccaccccgtttacgg

SEQ ID NO: 11112 - DNA, 23 bp, synthetic construct
  misc_feature 1..23: note = Synthetic construct
  source 1..23: mol_type = other DNA
agcacacccaccccgtttacggg

SEQ ID NO: 11113 - DNA, 23 bp, synthetic construct
  misc_feature 1..23: note = Synthetic construct
  source 1..23: mol_type = other DNA
gcacacccaccccgtttacgggg

SEQ ID NO: 11114 - DNA, 23 bp, synthetic construct
  misc_feature 1..23: note = Synthetic construct
  source 1..23: mol_type = other DNA
cacacccaccccgtttacggggg

SEQ ID NO: 11115 - DNA, 23 bp, synthetic construct
  misc_feature 1..23: note = Synthetic construct
  source 1..23: mol_type = other DNA
acacccaccccgtttacgggggt

SEQ ID NO: 11116 - DNA, 23 bp, synthetic construct
  misc_feature 1..23: note = Synthetic construct
  source 1..23: mol_type = other DNA
cacccaccccgtttacgggggtc

SEQ ID NO: 11117 - DNA, 23 bp, synthetic construct
  misc_feature 1..23: note = Synthetic construct
  source 1..23: mol_type = other DNA
acccaccccgtttacgggggtcc

SEQ ID NO: 11118 - DNA, 23 bp, synthetic construct
  misc_feature 1..23: note = Synthetic construct
  source 1..23: mol_type = other DNA
cccaccccgtttacgggggtccc

SEQ ID NO: 11119 - DNA, 23 bp, synthetic construct
  misc_feature 1..23: note = Synthetic construct
  source 1..23: mol_type = other DNA
ccaccccgtttacgggggtccct

SEQ ID NO: 11120 - DNA, 23 bp, synthetic construct
  misc_feature 1..23: note = Synthetic construct
  source 1..23: mol_type = other DNA
caccccgtttacgggggtccctc

SEQ ID NO: 11121 - DNA, 23 bp, synthetic construct
  misc_feature 1..23: note = Synthetic construct
  source 1..23: mol_type = other DNA
accccgtttacgggggtccctcg

SEQ ID NO: 11122 - DNA, 23 bp, synthetic construct
  misc_feature 1..23: note = Synthetic construct
  source 1..23: mol_type = other DNA
ccccgtttacgggggtccctcgg

SEQ ID NO: 11123 - DNA, 23 bp, synthetic construct
  misc_feature 1..23: note = Synthetic construct
  source 1..23: mol_type = other DNA
cccgtttacgggggtccctcggt

SEQ ID NO: 11124 - DNA, 23 bp, synthetic construct
  misc_feature 1..23: note = Synthetic construct
  source 1..23: mol_type = other DNA
ccgtttacgggggtccctcggtc

SEQ ID NO: 11125 - DNA, 23 bp, synthetic construct
  misc_feature 1..23: note = Synthetic construct
  source 1..23: mol_type = other DNA
cgtttacgggggtccctcggtca

SEQ ID NO: 11126 - DNA, 23 bp, synthetic construct
  misc_feature 1..23: note = Synthetic construct
  source 1..23: mol_type = other DNA
gtttacgggggtccctcggtcag

SEQ ID NO: 11127 - DNA, 23 bp, synthetic construct
  misc_feature 1..23: note = Synthetic construct
  source 1..23: mol_type = other DNA
tttacgggggtccctcggtcagc

SEQ ID NO: 11128 - DNA, 23 bp, synthetic construct
  misc_feature 1..23: note = Synthetic construct
  source 1..23: mol_type = other DNA
ttacgggggtccctcggtcagct

SEQ ID NO: 11129 - DNA, 23 bp, synthetic construct
  misc_feature 1..23: note = Synthetic construct
  source 1..23: mol_type = other DNA
tacgggggtccctcggtcagcta

SEQ ID NO: 11130 - DNA, 23 bp, synthetic construct
  misc_feature 1..23: note = Synthetic construct
  source 1..23: mol_type = other DNA
acgggggtccctcggtcagctac

SEQ ID NO: 11131 - DNA, 23 bp, synthetic construct
  misc_feature 1..23: note = Synthetic construct
  source 1..23: mol_type = other DNA
cgggggtccctcggtcagctacc

SEQ ID NO: 11132 - DNA, 23 bp, synthetic construct
  misc_feature 1..23: note = Synthetic construct
  source 1..23: mol_type = other DNA
gggggtccctcggtcagctaccg

SEQ ID NO: 11133 - DNA, 23 bp, synthetic construct
  misc_feature 1..23: note = Synthetic construct
  source 1..23: mol_type = other DNA
ggggtccctcggtcagctaccga

SEQ ID NO: 11134 - DNA, 23 bp, synthetic construct
  misc_feature 1..23: note = Synthetic construct
  source 1..23: mol_type = other DNA
gggtccctcggtcagctaccgag

SEQ ID NO: 11135 - DNA, 23 bp, synthetic construct
  misc_feature 1..23: note = Synthetic construct
  source 1..23: mol_type = other DNA
ggtccctcggtcagctaccgagg

SEQ ID NO: 11136 - DNA, 23 bp, synthetic construct
  misc_feature 1..23: note = Synthetic construct
  source 1..23: mol_type = other DNA
gtccctcggtcagctaccgagga

SEQ ID NO: 11137 - DNA, 23 bp, synthetic construct
  misc_feature 1..23: note = Synthetic construct
  source 1..23: mol_type = other DNA
tccctcggtcagctaccgaggag

SEQ ID NO: 11138 - DNA, 23 bp, synthetic construct
  misc_feature 1..23: note = Synthetic construct
  source 1..23: mol_type = other DNA
ccctcggtcagctaccgaggaga

SEQ ID NO: 11139 - DNA, 23 bp, synthetic construct
  misc_feature 1..23: note = Synthetic construct
  source 1..23: mol_type = other DNA
cctcggtcagctaccgaggagag

SEQ ID NO: 11140 - DNA, 23 bp, synthetic construct
  misc_feature 1..23: note = Synthetic construct
  source 1..23: mol_type = other DNA
ctcggtcagctaccgaggagagc

SEQ ID NO: 11141 - DNA, 23 bp, synthetic construct
  misc_feature 1..23: note = Synthetic construct
  source 1..23: mol_type = other DNA
tcggtcagctaccgaggagagct

SEQ ID NO: 11142 - DNA, 23 bp, synthetic construct
  misc_feature 1..23: note = Synthetic construct
  source 1..23: mol_type = other DNA
cggtcagctaccgaggagagctc

SEQ ID NO: 11143 - DNA, 23 bp, synthetic construct
  misc_feature 1..23: note = Synthetic construct
  source 1..23: mol_type = other DNA
ggtcagctaccgaggagagctcg

SEQ ID NO: 11144 - DNA, 23 bp, synthetic construct
  misc_feature 1..23: note = Synthetic construct
  source 1..23: mol_type = other DNA
gtcagctaccgaggagagctcgc

SEQ ID NO: 11145 - DNA, 23 bp, synthetic construct
  misc_feature 1..23: note = Synthetic construct
  source 1..23: mol_type = other DNA
tcagctaccgaggagagctcgct

SEQ ID NO: 11146 - DNA, 23 bp, synthetic construct
  misc_feature 1..23: note = Synthetic construct
  source 1..23: mol_type = other DNA
cagctaccgaggagagctcgctg

SEQ ID NO: 11147 - DNA, 23 bp, synthetic construct
  misc_feature 1..23: note = Synthetic construct
  source 1..23: mol_type = other DNA
agctaccgaggagagctcgctgg

SEQ ID NO: 11148 - DNA, 23 bp, synthetic construct
  misc_feature 1..23: note = Synthetic construct
  source 1..23: mol_type = other DNA
gctaccgaggagagctcgctggc

SEQ ID NO: 11149 - DNA, 23 bp, synthetic construct
  misc_feature 1..23: note = Synthetic construct
  source 1..23: mol_type = other DNA
ctaccgaggagagctcgctggcc

SEQ ID NO: 11150 - DNA, 23 bp, synthetic construct
  misc_feature 1..23: note = Synthetic construct
  source 1..23: mol_type = other DNA
taccgaggagagctcgctggccc

SEQ ID NO: 11151 - DNA, 23 bp, synthetic construct
  misc_feature 1..23: note = Synthetic construct
  source 1..23: mol_type = other DNA
accgaggagagctcgctggccca

SEQ ID NO: 11152 - DNA, 23 bp, synthetic construct
  misc_feature 1..23: note = Synthetic construct
  source 1..23: mol_type = other DNA
ccgaggagagctcgctggcccac

SEQ ID NO: 11153 - DNA, 23 bp, synthetic construct
  misc_feature 1..23: note = Synthetic construct
  source 1..23: mol_type = other DNA
cgaggagagctcgctggcccaca

SEQ ID NO: 11154 - DNA, 23 bp, synthetic construct
  misc_feature 1..23: note = Synthetic construct
  source 1..23: mol_type = other DNA
gaggagagctcgctggcccacac

SEQ ID NO: 11155 - DNA, 23 bp, synthetic construct
  misc_feature 1..23: note = Synthetic construct
  source 1..23: mol_type = other DNA
aggagagctcgctggcccacact

SEQ ID NO: 11156 - DNA, 23 bp, synthetic construct
  misc_feature 1..23: note = Synthetic construct
  source 1..23: mol_type = other DNA
ggagagctcgctggcccacactc

SEQ ID NO: 11157 - DNA, 23 bp, synthetic construct
  misc_feature 1..23: note = Synthetic construct
  source 1..23: mol_type = other DNA
gagagctcgctggcccacactcc

SEQ ID NO: 11158 - DNA, 23 bp, synthetic construct
  misc_feature 1..23: note = Synthetic construct
  source 1..23: mol_type = other DNA
agagctcgctggcccacactcct

SEQ ID NO: 11159 - DNA, 23 bp, synthetic construct
  misc_feature 1..23: note = Synthetic construct
  source 1..23: mol_type = other DNA
gagctcgctggcccacactcctg

SEQ ID NO: 11160 - DNA, 23 bp, synthetic construct
  misc_feature 1..23: note = Synthetic construct
  source 1..23: mol_type = other DNA
agctcgctggcccacactcctga

SEQ ID NO: 11161 - DNA, 23 bp, synthetic construct
  misc_feature 1..23: note = Synthetic construct
  source 1..23: mol_type = other DNA
gctcgctggcccacactcctgag

SEQ ID NO: 11162 - DNA, 23 bp, synthetic construct
  misc_feature 1..23: note = Synthetic construct
  source 1..23: mol_type = other DNA
ctcgctggcccacactcctgagg

SEQ ID NO: 11163 - DNA, 23 bp, synthetic construct
  misc_feature 1..23: note = Synthetic construct
  source 1..23: mol_type = other DNA
tcgctggcccacactcctgaggg

SEQ ID NO: 11164 - DNA, 23 bp, synthetic construct
  misc_feature 1..23: note = Synthetic construct
  source 1..23: mol_type = other DNA
cgctggcccacactcctgaggga

SEQ ID NO: 11165 - DNA, 23 bp, synthetic construct
  misc_feature 1..23: note = Synthetic construct
  source 1..23: mol_type = other DNA
gctggcccacactcctgagggaa

SEQ ID NO: 11166 - DNA, 23 bp, synthetic construct
  misc_feature 1..23: note = Synthetic construct
  source 1..23: mol_type = other DNA
ctggcccacactcctgagggaat

SEQ ID NO: 11167 - DNA, 23 bp, synthetic construct
  misc_feature 1..23: note = Synthetic construct
  source 1..23: mol_type = other DNA
tggcccacactcctgagggaatg

SEQ ID NO: 11168 - DNA, 23 bp, synthetic construct
  misc_feature 1..23: note = Synthetic construct
  source 1..23: mol_type = other DNA
ggcccacactcctgagggaatgt

SEQ ID NO: 11169 - DNA, 23 bp, synthetic construct
  misc_feature 1..23: note = Synthetic construct
  source 1..23: mol_type = other DNA
gcccacactcctgagggaatgtg

SEQ ID NO: 11170 - DNA, 23 bp, synthetic construct
  misc_feature 1..23: note = Synthetic construct
  source 1..23: mol_type = other DNA
cccacactcctgagggaatgtgg

SEQ ID NO: 11171 - DNA, 23 bp, synthetic construct
  misc_feature 1..23: note = Synthetic construct
  source 1..23: mol_type = other DNA
ccacactcctgagggaatgtggg

SEQ ID NO: 11172 - DNA, 23 bp, synthetic construct
  misc_feature 1..23: note = Synthetic construct
  source 1..23: mol_type = other DNA
cacactcctgagggaatgtggga

SEQ ID NO: 11173 - DNA, 23 bp, synthetic construct
  misc_feature 1..23: note = Synthetic construct
  source 1..23: mol_type = other DNA
acactcctgagggaatgtgggaa

SEQ ID NO: 11174 - DNA, 23 bp, synthetic construct
  misc_feature 1..23: note = Synthetic construct
  source 1..23: mol_type = other DNA
cactcctgagggaatgtgggaac

SEQ ID NO: 11175 - DNA, 23 bp, synthetic construct
  misc_feature 1..23: note = Synthetic construct
  source 1..23: mol_type = other DNA
actcctgagggaatgtgggaacc

SEQ ID NO: 11176 - DNA, 23 bp, synthetic construct
  misc_feature 1..23: note = Synthetic construct
  source 1..23: mol_type = other DNA
ctcctgagggaatgtgggaaccg

SEQ ID NO: 11177 - DNA, 23 bp, synthetic construct
  misc_feature 1..23: note = Synthetic construct
  source 1..23: mol_type = other DNA
tcctgagggaatgtgggaaccgg

SEQ ID NO: 11178 - DNA, 23 bp, synthetic construct
  misc_feature 1..23: note = Synthetic construct
  source 1..23: mol_type = other DNA
cctgagggaatgtgggaaccggc

SEQ ID NO: 11179 - DNA, 23 bp, synthetic construct
  misc_feature 1..23: note = Synthetic construct
  source 1..23: mol_type = other DNA
ctgagggaatgtgggaaccggcg

SEQ ID NO: 11180 - DNA, 23 bp, synthetic construct
  misc_feature 1..23: note = Synthetic construct
  source 1..23: mol_type = other DNA
tgagggaatgtgggaaccggcgt

SEQ ID NO: 11181 - DNA, 23 bp, synthetic construct
  misc_feature 1..23: note = Synthetic construct
  source 1..23: mol_type = other DNA
gagggaatgtgggaaccggcgtt

SEQ ID NO: 11182 - DNA, 23 bp, synthetic construct
  misc_feature 1..23: note = Synthetic construct
  source 1..23: mol_type = other DNA
agggaatgtgggaaccggcgtta

SEQ ID NO: 11183 - DNA, 23 bp, synthetic construct
  misc_feature 1..23: note = Synthetic construct
  source 1..23: mol_type = other DNA
gggaatgtgggaaccggcgttag

SEQ ID NO: 11184 - DNA, 23 bp, synthetic construct
  misc_feature 1..23: note = Synthetic construct
  source 1..23: mol_type = other DNA
ggaatgtgggaaccggcgttagc

SEQ ID NO: 11185 - DNA, 23 bp, synthetic construct
  misc_feature 1..23: note = Synthetic construct
  source 1..23: mol_type = other DNA
gaatgtgggaaccggcgttagcc

SEQ ID NO: 11186 - DNA, 23 bp, synthetic construct
  misc_feature 1..23: note = Synthetic construct
  source 1..23: mol_type = other DNA
aatgtgggaaccggcgttagcca

SEQ ID NO: 11187 - DNA, 23 bp, synthetic construct
  misc_feature 1..23: note = Synthetic construct
  source 1..23: mol_type = other DNA
atgtgggaaccggcgttagccac

SEQ ID NO: 11188 - DNA, 23 bp, synthetic construct
  misc_feature 1..23: note = Synthetic construct
  source 1..23: mol_type = other DNA
tgtgggaaccggcgttagccact

SEQ ID NO: 11189 - DNA, 23 bp, synthetic construct
  misc_feature 1..23: note = Synthetic construct
  source 1..23: mol_type = other DNA
gtgggaaccggcgttagccactc

SEQ ID NO: 11190 - DNA, 23 bp, synthetic construct
  misc_feature 1..23: note = Synthetic construct
  source 1..23: mol_type = other DNA
tgggaaccggcgttagccactcc

SEQ ID NO: 11191 - DNA, 23 bp, synthetic construct
  misc_feature 1..23: note = Synthetic construct
  source 1..23: mol_type = other DNA
gggaaccggcgttagccactccg

SEQ ID NO: 11192 - DNA, 23 bp, synthetic construct
  misc_feature 1..23: note = Synthetic construct
  source 1..23: mol_type = other DNA
ggaaccggcgttagccactccga

SEQ ID NO: 11193 - DNA, 23 bp, synthetic construct
  misc_feature 1..23: note = Synthetic construct
  source 1..23: mol_type = other DNA
gaaccggcgttagccactccgaa

SEQ ID NO: 11194 - DNA, 23 bp, synthetic construct
  misc_feature 1..23: note = Synthetic construct
  source 1..23: mol_type = other DNA
aaccggcgttagccactccgaag

SEQ ID NO: 11195 - DNA, 23 bp, synthetic construct
  misc_feature 1..23: note = Synthetic construct
  source 1..23: mol_type = other DNA
accggcgttagccactccgaagt

SEQ ID NO: 11196 - DNA, 23 bp, synthetic construct
  misc_feature 1..23: note = Synthetic construct
  source 1..23: mol_type = other DNA
ccggcgttagccactccgaagtg

SEQ ID NO: 11197 - DNA, 23 bp, synthetic construct
  misc_feature 1..23: note = Synthetic construct
  source 1..23: mol_type = other DNA
cggcgttagccactccgaagtgc

SEQ ID NO: 11198 - DNA, 23 bp, synthetic construct
  misc_feature 1..23: note = Synthetic construct
  source 1..23: mol_type = other DNA
ggcgttagccactccgaagtgcg

SEQ ID NO: 11199 - DNA, 23 bp, synthetic construct
  misc_feature 1..23: note = Synthetic construct
  source 1..23: mol_type = other DNA
gcgttagccactccgaagtgcgt

SEQ ID NO: 11200 - DNA, 23 bp, synthetic construct
  misc_feature 1..23: note = Synthetic construct
  source 1..23: mol_type = other DNA
cgttagccactccgaagtgcgta

SEQ ID NO: 11201 - DNA, 23 bp, synthetic construct
  misc_feature 1..23: note = Synthetic construct
  source 1..23: mol_type = other DNA
gttagccactccgaagtgcgtat

SEQ ID NO: 11202 - DNA, 23 bp, synthetic construct
  misc_feature 1..23: note = Synthetic construct
  source 1..23: mol_type = other DNA
ttagccactccgaagtgcgtata

SEQ ID NO: 11203 - DNA, 23 bp, synthetic construct
  misc_feature 1..23: note = Synthetic construct
  source 1..23: mol_type = other DNA
tagccactccgaagtgcgtataa

SEQ ID NO: 11204 - DNA, 23 bp, synthetic construct
  misc_feature 1..23: note = Synthetic construct
  source 1..23: mol_type = other DNA
agccactccgaagtgcgtataac

SEQ ID NO: 11205 - DNA, 23 bp, synthetic construct
  misc_feature 1..23: note = Synthetic construct
  source 1..23: mol_type = other DNA
gccactccgaagtgcgtataacg

SEQ ID NO: 11206 - DNA, 23 bp, synthetic construct
  misc_feature 1..23: note = Synthetic construct
  source 1..23: mol_type = other DNA
ccactccgaagtgcgtataacgc

SEQ ID NO: 11207 - DNA, 23 bp, synthetic construct
  misc_feature 1..23: note = Synthetic construct
  source 1..23: mol_type = other DNA
cactccgaagtgcgtataacgcg

SEQ ID NO: 11208 - DNA, 23 bp, synthetic construct
  misc_feature 1..23: note = Synthetic construct
  source 1..23: mol_type = other DNA
actccgaagtgcgtataacgcgc

SEQ ID NO: 11209 - DNA, 23 bp, synthetic construct
  misc_feature 1..23: note = Synthetic construct
  source 1..23: mol_type = other DNA
ctccgaagtgcgtataacgcgca

SEQ ID NO: 11210 - DNA, 23 bp, synthetic construct
  misc_feature 1..23: note = Synthetic construct
  source 1..23: mol_type = other DNA
tccgaagtgcgtataacgcgcac

SEQ ID NO: 11211 - DNA, 23 bp, synthetic construct
  misc_feature 1..23: note = Synthetic construct
  source 1..23: mol_type = other DNA
ccgaagtgcgtataacgcgcacg

SEQ ID NO: 11212 - DNA, 23 bp, synthetic construct
  misc_feature 1..23: note = Synthetic construct
  source 1..23: mol_type = other DNA
cgaagtgcgtataacgcgcacgc

SEQ ID NO: 11213 - DNA, 23 bp, synthetic construct
  misc_feature 1..23: note = Synthetic construct
  source 1..23: mol_type = other DNA
gaagtgcgtataacgcgcacgcc

SEQ ID NO: 11214 - DNA, 23 bp, synthetic construct
  misc_feature 1..23: note = Synthetic construct
  source 1..23: mol_type = other DNA
aagtgcgtataacgcgcacgccg

SEQ ID NO: 11215 - DNA, 23 bp, synthetic construct
  misc_feature 1..23: note = Synthetic construct
  source 1..23: mol_type = other DNA
agtgcgtataacgcgcacgccgg

SEQ ID NO: 11216 - DNA, 23 bp, synthetic construct
  misc_feature 1..23: note = Synthetic construct
  source 1..23: mol_type = other DNA
gtgcgtataacgcgcacgccggc

SEQ ID NO: 11217 - DNA, 23 bp, synthetic construct
  misc_feature 1..23: note = Synthetic construct
  source 1..23: mol_type = other DNA
tgcgtataacgcgcacgccggcg

SEQ ID NO: 11218 - DNA, 23 bp, synthetic construct
  misc_feature 1..23: note = Synthetic construct
  source 1..23: mol_type = other DNA
gcgtataacgcgcacgccggcgg

SEQ ID NO: 11219 - DNA, 23 bp, synthetic construct
  misc_feature 1..23: note = Synthetic construct
  source 1..23: mol_type = other DNA
cgtataacgcgcacgccggcgga

SEQ ID NO: 11220 - DNA, 23 bp, synthetic construct
  misc_feature 1..23: note = Synthetic construct
  source 1..23: mol_type = other DNA
gtataacgcgcacgccggcggac

SEQ ID NO: 11221 - DNA, 23 bp, synthetic construct
  misc_feature 1..23: note = Synthetic construct
  source 1..23: mol_type = other DNA
tataacgcgcacgccggcggact

SEQ ID NO: 11222 - DNA, 23 bp, synthetic construct
  misc_feature 1..23: note = Synthetic construct
  source 1..23: mol_type = other DNA
ataacgcgcacgccggcggactt

SEQ ID NO: 11223 - DNA, 23 bp, synthetic construct
  misc_feature 1..23: note = Synthetic construct
  source 1..23: mol_type = other DNA
taacgcgcacgccggcggacttc

SEQ ID NO: 11224 - DNA, 23 bp, synthetic construct
  misc_feature 1..23: note = Synthetic construct
  source 1..23: mol_type = other DNA
aacgcgcacgccggcggacttca

SEQ ID NO: 11225 - DNA, 23 bp, synthetic construct
  misc_feature 1..23: note = Synthetic construct
  source 1..23: mol_type = other DNA
acgcgcacgccggcggacttcat

SEQ ID NO: 11226 - DNA, 23 bp, synthetic construct
  misc_feature 1..23: note = Synthetic construct
  source 1..23: mol_type = other DNA
cgcgcacgccggcggacttcatg

SEQ ID NO: 11227 - DNA, 23 bp, synthetic construct
  misc_feature 1..23: note = Synthetic construct
  source 1..23: mol_type = other DNA
gcgcacgccggcggacttcatgc

SEQ ID NO: 11228 - DNA, 23 bp, synthetic construct
  misc_feature 1..23: note = Synthetic construct
  source 1..23: mol_type = other DNA
cgcacgccggcggacttcatgct

SEQ ID NO: 11229 - DNA, 23 bp, synthetic construct
  misc_feature 1..23: note = Synthetic construct
  source 1..23: mol_type = other DNA
gcacgccggcggacttcatgctg

SEQ ID NO: 11230 - DNA, 23 bp, synthetic construct
  misc_feature 1..23: note = Synthetic construct
  source 1..23: mol_type = other DNA
cacgccggcggacttcatgctgt

SEQ ID NO: 11231 - DNA, 23 bp, synthetic construct
  misc_feature 1..23: note = Synthetic construct
  source 1..23: mol_type = other DNA
acgccggcggacttcatgctgtc

SEQ ID NO: 11232 - DNA, 23 bp, synthetic construct
  misc_feature 1..23: note = Synthetic construct
  source 1..23: mol_type = other DNA
cgccggcggacttcatgctgtcg

SEQ ID NO: 11233 - DNA, 23 bp, synthetic construct
  misc_feature 1..23: note = Synthetic construct
  source 1..23: mol_type = other DNA
gccggcggacttcatgctgtcgg

SEQ ID NO: 11234 - DNA, 23 bp, synthetic construct
  misc_feature 1..23: note = Synthetic construct
  source 1..23: mol_type = other DNA
ccggcggacttcatgctgtcggt

SEQ ID NO: 11235 - DNA, 23 bp, synthetic construct
  misc_feature 1..23: note = Synthetic construct
  source 1..23: mol_type = other DNA
cggcggacttcatgctgtcggtg

SEQ ID NO: 11236 - DNA, 23 bp, synthetic construct
  misc_feature 1..23: note = Synthetic construct
  source 1..23: mol_type = other DNA
ggcggacttcatgctgtcggtga

SEQ ID NO: 11237 - DNA, 23 bp, synthetic construct
  misc_feature 1..23: note = Synthetic construct
  source 1..23: mol_type = other DNA
gcggacttcatgctgtcggtgat

SEQ ID NO: 11238 - DNA, 23 bp, synthetic construct
  misc_feature 1..23: note = Synthetic construct
  source 1..23: mol_type = other DNA
cggacttcatgctgtcggtgatt

SEQ ID NO: 11239 - DNA, 23 bp, synthetic construct
  misc_feature 1..23: note = Synthetic construct
  source 1..23: mol_type = other DNA
ggacttcatgctgtcggtgattt

SEQ ID NO: 11240 - DNA, 23 bp, synthetic construct
  misc_feature 1..23: note = Synthetic construct
  source 1..23: mol_type = other DNA
gacttcatgctgtcggtgatttc

SEQ ID NO: 11241 - DNA, 23 bp, synthetic construct
  misc_feature 1..23: note = Synthetic construct
  source 1..23: mol_type = other DNA
acttcatgctgtcggtgatttca

SEQ ID NO: 11242 - DNA, 23 bp, synthetic construct
  misc_feature 1..23: note = Synthetic construct
  source 1..23: mol_type = other DNA
cttcatgctgtcggtgatttcac

SEQ ID NO: 11243 - DNA, 23 bp, synthetic construct
  misc_feature 1..23: note = Synthetic construct
  source 1..23: mol_type = other DNA
ttcatgctgtcggtgatttcacc

SEQ ID NO: 11244 - DNA, 23 bp, synthetic construct
  misc_feature 1..23: note = Synthetic construct
  source 1..23: mol_type = other DNA
tcatgctgtcggtgatttcacct

SEQ ID NO: 11245 - DNA, 23 bp, synthetic construct
  misc_feature 1..23: note = Synthetic construct
  source 1..23: mol_type = other DNA
catgctgtcggtgatttcacctc

SEQ ID NO: 11246 - DNA, 23 bp, synthetic construct
  misc_feature 1..23: note = Synthetic construct
  source 1..23: mol_type = other DNA
atgctgtcggtgatttcacctcc

SEQ ID NO: 11247 - DNA, 23 bp, synthetic construct
  misc_feature 1..23: note = Synthetic construct
  source 1..23: mol_type = other DNA
tgctgtcggtgatttcacctcca

SEQ ID NO: 11248 - DNA, 23 bp, synthetic construct
  misc_feature 1..23: note = Synthetic construct
  source 1..23: mol_type = other DNA
gctgtcggtgatttcacctccag

SEQ ID NO: 11249 - DNA, 23 bp, synthetic construct
  misc_feature 1..23: note = Synthetic construct
  source 1..23: mol_type = other DNA
ctgtcggtgatttcacctccagt

SEQ ID NO: 11250 - DNA, 23 bp, synthetic construct
  misc_feature 1..23: note = Synthetic construct
  source 1..23: mol_type = other DNA
tgtcggtgatttcacctccagta

SEQ ID NO: 11251 - DNA, 23 bp, synthetic construct
  misc_feature 1..23: note = Synthetic construct
  source 1..23: mol_type = other DNA
gtcggtgatttcacctccagtat

SEQ ID NO: 11252 - DNA, 23 bp, synthetic construct
  misc_feature 1..23: note = Synthetic construct
  source 1..23: mol_type = other DNA
tcggtgatttcacctccagtatg

SEQ ID NO: 11253 - DNA, 23 bp, synthetic construct
  misc_feature 1..23: note = Synthetic construct
  source 1..23: mol_type = other DNA
cggtgatttcacctccagtatgg

SEQ ID NO: 11254 - DNA, 23 bp, synthetic construct
  misc_feature 1..23: note = Synthetic construct
  source 1..23: mol_type = other DNA
ggtgatttcacctccagtatgga

SEQ ID NO: 11255 - DNA, 23 bp, synthetic construct
  misc_feature 1..23: note = Synthetic construct
  source 1..23: mol_type = other DNA
gtgatttcacctccagtatggaa

SEQ ID NO: 11256 - DNA, 23 bp, synthetic construct
  misc_feature 1..23: note = Synthetic construct
  source 1..23: mol_type = other DNA
tgatttcacctccagtatggaac

SEQ ID NO: 11257 - DNA, 23 bp, synthetic construct
  misc_feature 1..23: note = Synthetic construct
  source 1..23: mol_type = other DNA
gatttcacctccagtatggaacc

SEQ ID NO: 11258 - DNA, 23 bp, synthetic construct
  misc_feature 1..23: note = Synthetic construct
  source 1..23: mol_type = other DNA
atttcacctccagtatggaacca

SEQ ID NO: 11259 - DNA, 23 bp, synthetic construct
  misc_feature 1..23: note = Synthetic construct
  source 1..23: mol_type = other DNA
tttcacctccagtatggaaccac

SEQ ID NO: 11260 - DNA, 23 bp, synthetic construct
  misc_feature 1..23: note = Synthetic construct
  source 1..23: mol_type = other DNA
ttcacctccagtatggaaccacg

SEQ ID NO: 11261 - DNA, 23 bp, synthetic construct
  misc_feature 1..23: note = Synthetic construct
  source 1..23: mol_type = other DNA
tcacctccagtatggaaccacgc

SEQ ID NO: 11262 - DNA, 23 bp, synthetic construct
  misc_feature 1..23: note = Synthetic construct
  source 1..23: mol_type = other DNA
cacctccagtatggaaccacgct

SEQ ID NO: 11263 - DNA, 23 bp, synthetic construct
  misc_feature 1..23: note = Synthetic construct
  source 1..23: mol_type = other DNA
acctccagtatggaaccacgcta

SEQ ID NO: 11264 - DNA, 23 bp, synthetic construct
  misc_feature 1..23: note = Synthetic construct
  source 1..23: mol_type = other DNA
cctccagtatggaaccacgctat

SEQ ID NO: 11265 - DNA, 23 bp, synthetic construct
  misc_feature 1..23: note = Synthetic construct
  source 1..23: mol_type = other DNA
ctccagtatggaaccacgctatg

SEQ ID NO: 11266 - DNA, 23 bp, synthetic construct
  misc_feature 1..23: note = Synthetic construct
  source 1..23: mol_type = other DNA
tccagtatggaaccacgctatgt

SEQ ID NO: 11267 - DNA, 23 bp, synthetic construct
  misc_feature 1..23: note = Synthetic construct
  source 1..23: mol_type = other DNA
ccagtatggaaccacgctatgta

SEQ ID NO: 11268 - DNA, 23 bp, synthetic construct
  misc_feature 1..23: note = Synthetic construct
  source 1..23: mol_type = other DNA
cagtatggaaccacgctatgtag

SEQ ID NO: 11269 - DNA, 23 bp, synthetic construct
  misc_feature 1..23: note = Synthetic construct
  source 1..23: mol_type = other DNA
agtatggaaccacgctatgtagc

SEQ ID NO: 11270 - DNA, 23 bp, synthetic construct
  misc_feature 1..23: note = Synthetic construct
  source 1..23: mol_type = other DNA
gtatggaaccacgctatgtagcg

SEQ ID NO: 11271 - DNA, 23 bp, synthetic construct
  misc_feature 1..23: note = Synthetic construct
  source 1..23: mol_type = other DNA
tatggaaccacgctatgtagcga

SEQ ID NO: 11272 - DNA, 23 bp, synthetic construct
  misc_feature 1..23: note = Synthetic construct
  source 1..23: mol_type = other DNA
atggaaccacgctatgtagcgac

SEQ ID NO: 11273 - DNA, 23 bp, synthetic construct
  misc_feature 1..23: note = Synthetic construct
  source 1..23: mol_type = other DNA
tggaaccacgctatgtagcgacc

SEQ ID NO: 11274 - DNA, 23 bp, synthetic construct
  misc_feature 1..23: note = Synthetic construct
  source 1..23: mol_type = other DNA
ggaaccacgctatgtagcgacca

SEQ ID NO: 11275 - DNA, 23 bp, synthetic construct
  misc_feature 1..23: note = Synthetic construct
  source 1..23: mol_type = other DNA
gaaccacgctatgtagcgaccac

SEQ ID NO: 11276 - DNA, 23 bp, synthetic construct
  misc_feature 1..23: note = Synthetic construct
  source 1..23: mol_type = other DNA
aaccacgctatgtagcgaccact

SEQ ID NO: 11277 - DNA, 23 bp, synthetic construct
  misc_feature 1..23: note = Synthetic construct
  source 1..23: mol_type = other DNA
accacgctatgtagcgaccactg

SEQ ID NO: 11278 - DNA, 23 bp, synthetic construct
  misc_feature 1..23: note = Synthetic construct
  source 1..23: mol_type = other DNA
ccacgctatgtagcgaccactgt

SEQ ID NO: 11279 - DNA, 23 bp, synthetic construct
  misc_feature 1..23: note = Synthetic construct
  source 1..23: mol_type = other DNA
cacgctatgtagcgaccactgtc

SEQ ID NO: 11280 - DNA, 23 bp, synthetic construct
  misc_feature 1..23: note = Synthetic construct
  source 1..23: mol_type = other DNA
acgctatgtagcgaccactgtcg

SEQ ID NO: 11281 - DNA, 23 bp, synthetic construct
  misc_feature 1..23: note = Synthetic construct
  source 1..23: mol_type = other DNA
cgctatgtagcgaccactgtcgt

SEQ ID NO: 11282 - DNA, 23 bp, synthetic construct
  misc_feature 1..23: note = Synthetic construct
  source 1..23: mol_type = other DNA
gctatgtagcgaccactgtcgtg

SEQ ID NO: 11283 - DNA, 23 bp, synthetic construct
  misc_feature 1..23: note = Synthetic construct
  source 1..23: mol_type = other DNA
ctatgtagcgaccactgtcgtgc

SEQ ID NO: 11284 - DNA, 23 bp, synthetic construct
  misc_feature 1..23: note = Synthetic construct
  source 1..23: mol_type = other DNA
tatgtagcgaccactgtcgtgct

SEQ ID NO: 11285 - DNA, 23 bp, synthetic construct
  misc_feature 1..23: note = Synthetic construct
  source 1..23: mol_type = other DNA
atgtagcgaccactgtcgtgctt

SEQ ID NO: 11286 - DNA, 23 bp, synthetic construct
  misc_feature 1..23: note = Synthetic construct
  source 1..23: mol_type = other DNA
tgtagcgaccactgtcgtgcttt

SEQ ID NO: 11287 - DNA, 23 bp, synthetic construct
  misc_feature 1..23: note = Synthetic construct
  source 1..23: mol_type = other DNA
gtagcgaccactgtcgtgctttt

SEQ ID NO: 11288 - DNA, 23 bp, synthetic construct
  misc_feature 1..23: note = Synthetic construct
  source 1..23: mol_type = other DNA
tagcgaccactgtcgtgcttttc

SEQ ID NO: 11289 - DNA, 23 bp, synthetic construct
  misc_feature 1..23: note = Synthetic construct
  source 1..23: mol_type = other DNA
agcgaccactgtcgtgcttttcg

SEQ ID NO: 11290 - DNA, 23 bp, synthetic construct
  misc_feature 1..23: note = Synthetic construct
  source 1..23: mol_type = other DNA
gcgaccactgtcgtgcttttcgc

SEQ ID NO: 11291 - DNA, 23 bp, synthetic construct
  misc_feature 1..23: note = Synthetic construct
  source 1..23: mol_type = other DNA
cgaccactgtcgtgcttttcgct

SEQ ID NO: 11292 - DNA, 23 bp, synthetic construct
  misc_feature 1..23: note = Synthetic construct
  source 1..23: mol_type = other DNA
gaccactgtcgtgcttttcgctg

SEQ ID NO: 11293 - DNA, 23 bp, synthetic construct
  misc_feature 1..23: note = Synthetic construct
  source 1..23: mol_type = other DNA
accactgtcgtgcttttcgctga

SEQ ID NO: 11294 - DNA, 23 bp, synthetic construct
  misc_feature 1..23: note = Synthetic construct
  source 1..23: mol_type = other DNA
ccactgtcgtgcttttcgctgaa

SEQ ID NO: 11295 - DNA, 23 bp, synthetic construct
  misc_feature 1..23: note = Synthetic construct
  source 1..23: mol_type = other DNA
cactgtcgtgcttttcgctgaag

SEQ ID NO: 11296 - DNA, 23 bp, synthetic construct
  misc_feature 1..23: note = Synthetic construct
  source 1..23: mol_type = other DNA
actgtcgtgcttttcgctgaaga

SEQ ID NO: 11297 - DNA, 23 bp, synthetic construct
  misc_feature 1..23: note = Synthetic construct
  source 1..23: mol_type = other DNA
ctgtcgtgcttttcgctgaagaa

SEQ ID NO: 11298 - DNA, 23 bp, synthetic construct
  misc_feature 1..23: note = Synthetic construct
  source 1..23: mol_type = other DNA
tgtcgtgcttttcgctgaagaac

SEQ ID NO: 11299 - DNA, 23 bp, synthetic construct
  misc_feature 1..23: note = Synthetic construct
  source 1..23: mol_type = other DNA
gtcgtgcttttcgctgaagaact

SEQ ID NO: 11300 - DNA, 23 bp, synthetic construct
  misc_feature 1..23: note = Synthetic construct
  source 1..23: mol_type = other DNA
tcgtgcttttcgctgaagaactt

SEQ ID NO: 11301 - DNA, 23 bp, synthetic construct
  misc_feature 1..23: note = Synthetic construct
  source 1..23: mol_type = other DNA
cgtgcttttcgctgaagaacttg

SEQ ID NO: 11302 - DNA, 23 bp, synthetic construct
  misc_feature 1..23: note = Synthetic construct
  source 1..23: mol_type = other DNA
gtgcttttcgctgaagaacttgc

SEQ ID NO: 11303 - DNA, 23 bp, synthetic construct
  misc_feature 1..23: note = Synthetic construct
  source 1..23: mol_type = other DNA
tgcttttcgctgaagaacttgcg

SEQ ID NO: 11304 - DNA, 23 bp, synthetic construct
  misc_feature 1..23: note = Synthetic construct
  source 1..23: mol_type = other DNA
gcttttcgctgaagaacttgcgt

SEQ ID NO: 11305 - DNA, 23 bp, synthetic construct
  misc_feature 1..23: note = Synthetic construct
  source 1..23: mol_type = other DNA
cttttcgctgaagaacttgcgtt

SEQ ID NO: 11306 - DNA, 23 bp, synthetic construct
  misc_feature 1..23: note = Synthetic construct
  source 1..23: mol_type = other DNA
ttttcgctgaagaacttgcgttc

SEQ ID NO: 11307 - DNA, 23 bp, synthetic construct
  misc_feature 1..23: note = Synthetic construct
  source 1..23: mol_type = other DNA
tttcgctgaagaacttgcgttct

SEQ ID NO: 11308 - DNA, 23 bp, synthetic construct
  misc_feature 1..23: note = Synthetic construct
  source 1..23: mol_type = other DNA
ttcgctgaagaacttgcgttctc

SEQ ID NO: 11309 - DNA, 23 bp, synthetic construct
  misc_feature 1..23: note = Synthetic construct
  source 1..23: mol_type = other DNA
tcgctgaagaacttgcgttctcg

SEQ ID NO: 11310 - DNA, 23 bp, synthetic construct
  misc_feature 1..23: note = Synthetic construct
  source 1..23: mol_type = other DNA
cgctgaagaacttgcgttctcga

SEQ ID NO: 11311 - DNA, 23 bp, synthetic construct
  misc_feature 1..23: note = Synthetic construct
  source 1..23: mol_type = other DNA
gctgaagaacttgcgttctcgag

SEQ ID NO: 11312 - DNA, 23 bp, synthetic construct
  misc_feature 1..23: note = Synthetic construct
  source 1..23: mol_type = other DNA
ctgaagaacttgcgttctcgagc

SEQ ID NO: 11313 - DNA, 23 bp, synthetic construct
  misc_feature 1..23: note = Synthetic construct
  source 1..23: mol_type = other DNA
tgaagaacttgcgttctcgagcg

SEQ ID NO: 11314 - DNA, 23 bp, synthetic construct
  misc_feature 1..23: note = Synthetic construct
  source 1..23: mol_type = other DNA
gaagaacttgcgttctcgagcga

SEQ ID NO: 11315 - DNA, 23 bp, synthetic construct
  misc_feature 1..23: note = Synthetic construct
  source 1..23: mol_type = other DNA
aagaacttgcgttctcgagcgat

SEQ ID NO: 11316 - DNA, 23 bp, synthetic construct
  misc_feature 1..23: note = Synthetic construct
  source 1..23: mol_type = other DNA
agaacttgcgttctcgagcgata

SEQ ID NO: 11317 - DNA, 23 bp, synthetic construct
  misc_feature 1..23: note = Synthetic construct
  source 1..23: mol_type = other DNA
gaacttgcgttctcgagcgatac

SEQ ID NO: 11318 - DNA, 23 bp, synthetic construct
  misc_feature 1..23: note = Synthetic construct
  source 1..23: mol_type = other DNA
aacttgcgttctcgagcgatacg

SEQ ID NO: 11319 - DNA, 23 bp, synthetic construct
  misc_feature 1..23: note = Synthetic construct
  source 1..23: mol_type = other DNA
acttgcgttctcgagcgatacga

SEQ ID NO: 11320 - DNA, 23 bp, synthetic construct
  misc_feature 1..23: note = Synthetic construct
  source 1..23: mol_type = other DNA
cttgcgttctcgagcgatacgag

SEQ ID NO: 11321 - DNA, 23 bp, synthetic construct
  misc_feature 1..23: note = Synthetic construct
  source 1..23: mol_type = other DNA
ttgcgttctcgagcgatacgagc

SEQ ID NO: 11322 - DNA, 23 bp, synthetic construct
  misc_feature 1..23: note = Synthetic construct
  source 1..23: mol_type = other DNA
tgcgttctcgagcgatacgagca

SEQ ID NO: 11323 - DNA, 23 bp, synthetic construct
  misc_feature 1..23: note = Synthetic construct
  source 1..23: mol_type = other DNA
gcgttctcgagcgatacgagcaa

SEQ ID NO: 11324 - DNA, 23 bp, synthetic construct
  misc_feature 1..23: note = Synthetic construct
  source 1..23: mol_type = other DNA
cgttctcgagcgatacgagcaag

SEQ ID NO: 11325 - DNA, 23 bp, synthetic construct
  misc_feature 1..23: note = Synthetic construct
  source 1..23: mol_type = other DNA
gttctcgagcgatacgagcaaga

SEQ ID NO: 11326 - DNA, 23 bp, synthetic construct
  misc_feature 1..23: note = Synthetic construct
  source 1..23: mol_type = other DNA
ttctcgagcgatacgagcaagac

SEQ ID NO: 11327 - DNA, 23 bp, synthetic construct
  misc_feature 1..23: note = Synthetic construct
  source 1..23: mol_type = other DNA
tctcgagcgatacgagcaagacg

SEQ ID NO: 11328 - DNA, 23 bp, synthetic construct
  misc_feature 1..23: note = Synthetic construct
  source 1..23: mol_type = other DNA
ctcgagcgatacgagcaagacgg

SEQ ID NO: 11329 - DNA, 23 bp, synthetic construct
  misc_feature 1..23: note = Synthetic construct
  source 1..23: mol_type = other DNA
tcgagcgatacgagcaagacgga

SEQ ID NO: 11330 - DNA, 23 bp, synthetic construct
  misc_feature 1..23: note = Synthetic construct
  source 1..23: mol_type = other DNA
cgagcgatacgagcaagacggaa

SEQ ID NO: 11331 - DNA, 23 bp, synthetic construct
  misc_feature 1..23: note = Synthetic construct
  source 1..23: mol_type = other DNA
gagcgatacgagcaagacggaaa

SEQ ID NO: 11332 - DNA, 23 bp, synthetic construct
  misc_feature 1..23: note = Synthetic construct
  source 1..23: mol_type = other DNA
agcgatacgagcaagacggaaac

SEQ ID NO: 11333 - DNA, 23 bp, synthetic construct
  misc_feature 1..23: note = Synthetic construct
  source 1..23: mol_type = other DNA
gcgatacgagcaagacggaaacc

SEQ ID NO: 11334 - DNA, 23 bp, synthetic construct
  misc_feature 1..23: note = Synthetic construct
  source 1..23: mol_type = other DNA
cgatacgagcaagacggaaaccc

SEQ ID NO: 11335 - DNA, 23 bp, synthetic construct
  misc_feature 1..23: note = Synthetic construct
  source 1..23: mol_type = other DNA
gatacgagcaagacggaaacccg

SEQ ID NO: 11336 - DNA, 23 bp, synthetic construct
  misc_feature 1..23: note = Synthetic construct
  source 1..23: mol_type = other DNA
atacgagcaagacggaaacccga

SEQ ID NO: 11337 - DNA, 23 bp, synthetic construct
  misc_feature 1..23: note = Synthetic construct
  source 1..23: mol_type = other DNA
tacgagcaagacggaaacccgag

SEQ ID NO: 11338 - DNA, 23 bp, synthetic construct
  misc_feature 1..23: note = Synthetic construct
  source 1..23: mol_type = other DNA
acgagcaagacggaaacccgagg

SEQ ID NO: 11339 - DNA, 23 bp, synthetic construct
  misc_feature 1..23: note = Synthetic construct
  source 1..23: mol_type = other DNA
cgagcaagacggaaacccgaggt

SEQ ID NO: 11340 - DNA, 23 bp, synthetic construct
  misc_feature 1..23: note = Synthetic construct
  source 1..23: mol_type = other DNA
gagcaagacggaaacccgaggta

SEQ ID NO: 11341 - DNA, 23 bp, synthetic construct
  misc_feature 1..23: note = Synthetic construct
  source 1..23: mol_type = other DNA
agcaagacggaaacccgaggtac

SEQ ID NO: 11342 - DNA, 23 bp, synthetic construct
  misc_feature 1..23: note = Synthetic construct
  source 1..23: mol_type = other DNA
gcaagacggaaacccgaggtacg

SEQ ID NO: 11343 - DNA, 23 bp, synthetic construct
  misc_feature 1..23: note = Synthetic construct
  source 1..23: mol_type = other DNA
caagacggaaacccgaggtacgg

SEQ ID NO: 11344 - DNA, 23 bp, synthetic construct
  misc_feature 1..23: note = Synthetic construct
  source 1..23: mol_type = other DNA
aagacggaaacccgaggtacggg

SEQ ID NO: 11345 - DNA, 23 bp, synthetic construct
  misc_feature 1..23: note = Synthetic construct
  source 1..23: mol_type = other DNA
agacggaaacccgaggtacgggt

SEQ ID NO: 11346 - DNA, 23 bp, synthetic construct
  misc_feature 1..23: note = Synthetic construct
  source 1..23: mol_type = other DNA
gacggaaacccgaggtacgggta

SEQ ID NO: 11347 - DNA, 23 bp, synthetic construct
  misc_feature 1..23: note = Synthetic construct
  source 1..23: mol_type = other DNA
acggaaacccgaggtacgggtat

SEQ ID NO: 11348 - DNA, 23 bp, synthetic construct
  misc_feature 1..23: note = Synthetic construct
  source 1..23: mol_type = other DNA
cggaaacccgaggtacgggtatc

SEQ ID NO: 11349 - DNA, 23 bp, synthetic construct
  misc_feature 1..23: note = Synthetic construct
  source 1..23: mol_type = other DNA
ggaaacccgaggtacgggtatcc

SEQ ID NO: 11350 - DNA, 23 bp, synthetic construct
  misc_feature 1..23: note = Synthetic construct
  source 1..23: mol_type = other DNA
gaaacccgaggtacgggtatccg

SEQ ID NO: 11351 - DNA, 23 bp, synthetic construct
  misc_feature 1..23: note = Synthetic construct
  source 1..23: mol_type = other DNA
aaacccgaggtacgggtatccgc

SEQ ID NO: 11352 - DNA, 23 bp, synthetic construct
  misc_feature 1..23: note = Synthetic construct
  source 1..23: mol_type = other DNA
aacccgaggtacgggtatccgcg

SEQ ID NO: 11353 - DNA, 23 bp, synthetic construct
  misc_feature 1..23: note = Synthetic construct
  source 1..23: mol_type = other DNA
acccgaggtacgggtatccgcga

SEQ ID NO: 11354 - DNA, 23 bp, synthetic construct
  misc_feature 1..23: note = Synthetic construct
  source 1..23: mol_type = other DNA
cccgaggtacgggtatccgcgag

SEQ ID NO: 11355 - DNA, 23 bp, synthetic construct
  misc_feature 1..23: note = Synthetic construct
  source 1..23: mol_type = other DNA
ccgaggtacgggtatccgcgagc

SEQ ID NO: 11356 - DNA, 23 bp, synthetic construct
  misc_feature 1..23: note = Synthetic construct
  source 1..23: mol_type = other DNA
cgaggtacgggtatccgcgagca

SEQ ID NO: 11357 - DNA, 23 bp, synthetic construct
  misc_feature 1..23: note = Synthetic construct
  source 1..23: mol_type = other DNA
gaggtacgggtatccgcgagcag

SEQ ID NO: 11358 - DNA, 23 bp, synthetic construct
  misc_feature 1..23: note = Synthetic construct
  source 1..23: mol_type = other DNA
aggtacgggtatccgcgagcagc

SEQ ID NO: 11359 - DNA, 23 bp, synthetic construct
  misc_feature 1..23: note = Synthetic construct
  source 1..23: mol_type = other DNA
ggtacgggtatccgcgagcagcc

SEQ ID NO: 11360 - DNA, 23 bp, synthetic construct
  misc_feature 1..23: note = Synthetic construct
  source 1..23: mol_type = other DNA
gtacgggtatccgcgagcagccg

SEQ ID NO: 11361 - DNA, 23 bp, synthetic construct
  misc_feature 1..23: note = Synthetic construct
  source 1..23: mol_type = other DNA
tacgggtatccgcgagcagccgc

SEQ ID NO: 11362 - DNA, 23 bp, synthetic construct
  misc_feature 1..23: note = Synthetic construct
  source 1..23: mol_type = other DNA
acgggtatccgcgagcagccgcc

SEQ ID NO: 11363 - DNA, 23 bp, synthetic construct
  misc_feature 1..23: note = Synthetic construct
  source 1..23: mol_type = other DNA
cgggtatccgcgagcagccgccc

SEQ ID NO: 11364 - DNA, 23 bp, synthetic construct
  misc_feature 1..23: note = Synthetic construct
  source 1..23: mol_type = other DNA
gggtatccgcgagcagccgcccg

SEQ ID NO: 11365 - DNA, 23 bp, synthetic construct
  misc_feature 1..23: note = Synthetic construct
  source 1..23: mol_type = other DNA
ggtatccgcgagcagccgcccgt

SEQ ID NO: 11366 - DNA, 23 bp, synthetic construct
  misc_feature 1..23: note = Synthetic construct
  source 1..23: mol_type = other DNA
gtatccgcgagcagccgcccgta

SEQ ID NO: 11367 - DNA, 23 bp, synthetic construct
  misc_feature 1..23: note = Synthetic construct
  source 1..23: mol_type = other DNA
tatccgcgagcagccgcccgtac

SEQ ID NO: 11368 - DNA, 23 bp, synthetic construct
  misc_feature 1..23: note = Synthetic construct
  source 1..23: mol_type = other DNA
atccgcgagcagccgcccgtacg

SEQ ID NO: 11369 - DNA, 23 bp, synthetic construct
  misc_feature 1..23: note = Synthetic construct
  source 1..23: mol_type = other DNA
tccgcgagcagccgcccgtacgg

SEQ ID NO: 11370 - DNA, 23 bp, synthetic construct
  misc_feature 1..23: note = Synthetic construct
  source 1..23: mol_type = other DNA
ccgcgagcagccgcccgtacgga

SEQ ID NO: 11371 - DNA, 23 bp, synthetic construct
  misc_feature 1..23: note = Synthetic construct
  source 1..23: mol_type = other DNA
cgcgagcagccgcccgtacggag

SEQ ID NO: 11372 - DNA, 23 bp, synthetic construct
  misc_feature 1..23: note = Synthetic construct
  source 1..23: mol_type = other DNA
gcgagcagccgcccgtacggagt

SEQ ID NO: 11373 - DNA, 23 bp, synthetic construct
  misc_feature 1..23: note = Synthetic construct
  source 1..23: mol_type = other DNA
cgagcagccgcccgtacggagtc

SEQ ID NO: 11374 - DNA, 23 bp, synthetic construct
  misc_feature 1..23: note = Synthetic construct
  source 1..23: mol_type = other DNA
gagcagccgcccgtacggagtct

SEQ ID NO: 11375 - DNA, 23 bp, synthetic construct
  misc_feature 1..23: note = Synthetic construct
  source 1..23: mol_type = other DNA
agcagccgcccgtacggagtctt

SEQ ID NO: 11376 - DNA, 23 bp, synthetic construct
  misc_feature 1..23: note = Synthetic construct
  source 1..23: mol_type = other DNA
gcagccgcccgtacggagtcttg

SEQ ID NO: 11377 - DNA, 23 bp, synthetic construct
  misc_feature 1..23: note = Synthetic construct
  source 1..23: mol_type = other DNA
cagccgcccgtacggagtcttgg

SEQ ID NO: 11378 - DNA, 23 bp, synthetic construct
  misc_feature 1..23: note = Synthetic construct
  source 1..23: mol_type = other DNA
agccgcccgtacggagtcttggt

SEQ ID NO: 11379 - DNA, 23 bp, synthetic construct
  misc_feature 1..23: note = Synthetic construct
  source 1..23: mol_type = other DNA
gccgcccgtacggagtcttggtg

SEQ ID NO: 11380 - DNA, 23 bp, synthetic construct
  misc_feature 1..23: note = Synthetic construct
  source 1..23: mol_type = other DNA
ccgcccgtacggagtcttggtgt

SEQ ID NO: 11381 - DNA, 23 bp, synthetic construct
  misc_feature 1..23: note = Synthetic construct
  source 1..23: mol_type = other DNA
cgcccgtacggagtcttggtgta

SEQ ID NO: 11382 - DNA, 23 bp, synthetic construct
  misc_feature 1..23: note = Synthetic construct
  source 1..23: mol_type = other DNA
gcccgtacggagtcttggtgtat

SEQ ID NO: 11383 - DNA, 23 bp, synthetic construct
  misc_feature 1..23: note = Synthetic construct
  source 1..23: mol_type = other DNA
cccgtacggagtcttggtgtata

SEQ ID NO: 11384 - DNA, 23 bp, synthetic construct
  misc_feature 1..23: note = Synthetic construct
  source 1..23: mol_type = other DNA
ccgtacggagtcttggtgtatac

SEQ ID NO: 11385 - DNA, 23 bp, synthetic construct
  misc_feature 1..23: note = Synthetic construct
  source 1..23: mol_type = other DNA
cgtacggagtcttggtgtatacc

SEQ ID NO: 11386 - DNA, 23 bp, synthetic construct
  misc_feature 1..23: note = Synthetic construct
  source 1..23: mol_type = other DNA
gtacggagtcttggtgtataccg

SEQ ID NO: 11387 - DNA, 23 bp, synthetic construct
  misc_feature 1..23: note = Synthetic construct
  source 1..23: mol_type = other DNA
tacggagtcttggtgtataccga

SEQ ID NO: 11388 - DNA, 23 bp, synthetic construct
  misc_feature 1..23: note = Synthetic construct
  source 1..23: mol_type = other DNA
acggagtcttggtgtataccgag

SEQ ID NO: 11389 - DNA, 23 bp, synthetic construct
  misc_feature 1..23: note = Synthetic construct
  source 1..23: mol_type = other DNA
cggagtcttggtgtataccgaga

SEQ ID NO: 11390 - DNA, 23 bp, synthetic construct
  misc_feature 1..23: note = Synthetic construct
  source 1..23: mol_type = other DNA
ggagtcttggtgtataccgagac

SEQ ID NO: 11391 - DNA, 23 bp, synthetic construct
  misc_feature 1..23: note = Synthetic construct
  source 1..23: mol_type = other DNA
gagtcttggtgtataccgagact

SEQ ID NO: 11392 - DNA, 23 bp, synthetic construct
  misc_feature 1..23: note = Synthetic construct
  source 1..23: mol_type = other DNA
agtcttggtgtataccgagactg

SEQ ID NO: 11393 - DNA, 23 bp, synthetic construct
  misc_feature 1..23: note = Synthetic construct
  source 1..23: mol_type = other DNA
gtcttggtgtataccgagactgc

SEQ ID NO: 11394 - DNA, 23 bp, synthetic construct
  misc_feature 1..23: note = Synthetic construct
  source 1..23: mol_type = other DNA
tcttggtgtataccgagactgcc

SEQ ID NO: 11395 - DNA, 23 bp, synthetic construct
  misc_feature 1..23: note = Synthetic construct
  source 1..23: mol_type = other DNA
cttggtgtataccgagactgccg

SEQ ID NO: 11396 - DNA, 23 bp, synthetic construct
  misc_feature 1..23: note = Synthetic construct
  source 1..23: mol_type = other DNA
ttggtgtataccgagactgccgt

SEQ ID NO: 11397 - DNA, 23 bp, synthetic construct
  misc_feature 1..23: note = Synthetic construct
  source 1..23: mol_type = other DNA
tggtgtataccgagactgccgta

SEQ ID NO: 11398 - DNA, 23 bp, synthetic construct
  misc_feature 1..23: note = Synthetic construct
  source 1..23: mol_type = other DNA
ggtgtataccgagactgccgtag

SEQ ID NO: 11399 - DNA, 23 bp, synthetic construct
  misc_feature 1..23: note = Synthetic construct
  source 1..23: mol_type = other DNA
gtgtataccgagactgccgtagg

SEQ ID NO: 11400 - DNA, 23 bp, synthetic construct
  misc_feature 1..23: note = Synthetic construct
  source 1..23: mol_type = other DNA
tgtataccgagactgccgtaggc

SEQ ID NO: 11401 - DNA, 23 bp, synthetic construct
  misc_feature 1..23: note = Synthetic construct
  source 1..23: mol_type = other DNA
gtataccgagactgccgtaggcg

SEQ ID NO: 11402 - DNA, 23 bp, synthetic construct
  misc_feature 1..23: note = Synthetic construct
  source 1..23: mol_type = other DNA
tataccgagactgccgtaggcgg

SEQ ID NO: 11403 - DNA, 23 bp, synthetic construct
  misc_feature 1..23: note = Synthetic construct
  source 1..23: mol_type = other DNA
ataccgagactgccgtaggcggg

SEQ ID NO: 11404 - DNA, 23 bp, synthetic construct
  misc_feature 1..23: note = Synthetic construct
  source 1..23: mol_type = other DNA
taccgagactgccgtaggcgggc

SEQ ID NO: 11405 - DNA, 23 bp, synthetic construct
  misc_feature 1..23: note = Synthetic construct
  source 1..23: mol_type = other DNA
accgagactgccgtaggcgggct

SEQ ID NO: 11406 - DNA, 23 bp, synthetic construct
  misc_feature 1..23: note = Synthetic construct
  source 1..23: mol_type = other DNA
ccgagactgccgtaggcgggctg

SEQ ID NO: 11407 - DNA, 23 bp, synthetic construct
  misc_feature 1..23: note = Synthetic construct
  source 1..23: mol_type = other DNA
cgagactgccgtaggcgggctga

SEQ ID NO: 11408 - DNA, 23 bp, synthetic construct
  misc_feature 1..23: note = Synthetic construct
  source 1..23: mol_type = other DNA
gagactgccgtaggcgggctgac

SEQ ID NO: 11409 - DNA, 23 bp, synthetic construct
  misc_feature 1..23: note = Synthetic construct
  source 1..23: mol_type = other DNA
agactgccgtaggcgggctgact

SEQ ID NO: 11410 - DNA, 23 bp, synthetic construct
  misc_feature 1..23: note = Synthetic construct
  source 1..23: mol_type = other DNA
gactgccgtaggcgggctgacta

SEQ ID NO: 11411 - DNA, 23 bp, synthetic construct
  misc_feature 1..23: note = Synthetic construct
  source 1..23: mol_type = other DNA
actgccgtaggcgggctgactac

SEQ ID NO: 11412 - DNA, 23 bp, synthetic construct
  misc_feature 1..23: note = Synthetic construct
  source 1..23: mol_type = other DNA
ctgccgtaggcgggctgactacg

SEQ ID NO: 11413 - DNA, 23 bp, synthetic construct
  misc_feature 1..23: note = Synthetic construct
  source 1..23: mol_type = other DNA
tgccgtaggcgggctgactacgt

SEQ ID NO: 11414 - DNA, 23 bp, synthetic construct
  misc_feature 1..23: note = Synthetic construct
  source 1..23: mol_type = other DNA
gccgtaggcgggctgactacgta

SEQ ID NO: 11415 - DNA, 23 bp, synthetic construct
  misc_feature 1..23: note = Synthetic construct
  source 1..23: mol_type = other DNA
ccgtaggcgggctgactacgtag

SEQ ID NO: 11416 - DNA, 23 bp, synthetic construct
  misc_feature 1..23: note = Synthetic construct
  source 1..23: mol_type = other DNA
cgtaggcgggctgactacgtagt

SEQ ID NO: 11417 - DNA, 23 bp, synthetic construct
  misc_feature 1..23: note = Synthetic construct
  source 1..23: mol_type = other DNA
gtaggcgggctgactacgtagta

SEQ ID NO: 11418 - DNA, 23 bp, synthetic construct
  misc_feature 1..23: note = Synthetic construct
  source 1..23: mol_type = other DNA
taggcgggctgactacgtagtag

SEQ ID NO: 11419 - DNA, 23 bp, synthetic construct
  misc_feature 1..23: note = Synthetic construct
  source 1..23: mol_type = other DNA
aggcgggctgactacgtagtagt

SEQ ID NO: 11420 - DNA, 23 bp, synthetic construct
  misc_feature 1..23: note = Synthetic construct
  source 1..23: mol_type = other DNA
ggcgggctgactacgtagtagtc

SEQ ID NO: 11421 - DNA, 23 bp, synthetic construct
  misc_feature 1..23: note = Synthetic construct
  source 1..23: mol_type = other DNA
gcgggctgactacgtagtagtcg

SEQ ID NO: 11422 - DNA, 23 bp, synthetic construct
  misc_feature 1..23: note = Synthetic construct
  source 1..23: mol_type = other DNA
cgggctgactacgtagtagtcgg

SEQ ID NO: 11423 - DNA, 23 bp, synthetic construct
  misc_feature 1..23: note = Synthetic construct
  source 1..23: mol_type = other DNA
gggctgactacgtagtagtcggc

SEQ ID NO: 11424 - DNA, 23 bp, synthetic construct
  misc_feature 1..23: note = Synthetic construct
  source 1..23: mol_type = other DNA
ggctgactacgtagtagtcggca

SEQ ID NO: 11425 - DNA, 23 bp, synthetic construct
  misc_feature 1..23: note = Synthetic construct
  source 1..23: mol_type = other DNA
gctgactacgtagtagtcggcag

SEQ ID NO: 11426 - DNA, 23 bp, synthetic construct
  misc_feature 1..23: note = Synthetic construct
  source 1..23: mol_type = other DNA
ctgactacgtagtagtcggcagc

SEQ ID NO: 11427 - DNA, 23 bp, synthetic construct
  misc_feature 1..23: note = Synthetic construct
  source 1..23: mol_type = other DNA
tgactacgtagtagtcggcagcg

SEQ ID NO: 11428 - DNA, 23 bp, synthetic construct
  misc_feature 1..23: note = Synthetic construct
  source 1..23: mol_type = other DNA
gactacgtagtagtcggcagcga

SEQ ID NO: 11429 - DNA, 23 bp, synthetic construct
  misc_feature 1..23: note = Synthetic construct
  source 1..23: mol_type = other DNA
actacgtagtagtcggcagcgag

SEQ ID NO: 11430 - DNA, 23 bp, synthetic construct
  misc_feature 1..23: note = Synthetic construct
  source 1..23: mol_type = other DNA
ctacgtagtagtcggcagcgagg

SEQ ID NO: 11431 - DNA, 23 bp, synthetic construct
  misc_feature 1..23: note = Synthetic construct
  source 1..23: mol_type = other DNA
tacgtagtagtcggcagcgaggt

SEQ ID NO: 11432 - DNA, 23 bp, synthetic construct
  misc_feature 1..23: note = Synthetic construct
  source 1..23: mol_type = other DNA
acgtagtagtcggcagcgaggtc

SEQ ID NO: 11433 - DNA, 23 bp, synthetic construct
  misc_feature 1..23: note = Synthetic construct
  source 1..23: mol_type = other DNA
cgtagtagtcggcagcgaggtcc

SEQ ID NO: 11434 - DNA, 23 bp, synthetic construct
  misc_feature 1..23: note = Synthetic construct
  source 1..23: mol_type = other DNA
gtagtagtcggcagcgaggtccg

SEQ ID NO: 11435 - DNA, 23 bp, synthetic construct
  misc_feature 1..23: note = Synthetic construct
  source 1..23: mol_type = other DNA
tagtagtcggcagcgaggtccgt

SEQ ID NO: 11436 - DNA, 23 bp, synthetic construct
  misc_feature 1..23: note = Synthetic construct
  source 1..23: mol_type = other DNA
agtagtcggcagcgaggtccgtc

SEQ ID NO: 11437 - DNA, 23 bp, synthetic construct
  misc_feature 1..23: note = Synthetic construct
  source 1..23: mol_type = other DNA
gtagtcggcagcgaggtccgtcc

SEQ ID NO: 11438 - DNA, 23 bp, synthetic construct
  misc_feature 1..23: note = Synthetic construct
  source 1..23: mol_type = other DNA
tagtcggcagcgaggtccgtccc

SEQ ID NO: 11439 - DNA, 23 bp, synthetic construct
  misc_feature 1..23: note = Synthetic construct
  source 1..23: mol_type = other DNA
agtcggcagcgaggtccgtccca

SEQ ID NO: 11440 - DNA, 23 bp, synthetic construct
  misc_feature 1..23: note = Synthetic construct
  source 1..23: mol_type = other DNA
gtcggcagcgaggtccgtcccac

SEQ ID NO: 11441 - DNA, 23 bp, synthetic construct
  misc_feature 1..23: note = Synthetic construct
  source 1..23: mol_type = other DNA
tcggcagcgaggtccgtcccacc

SEQ ID NO: 11442 - DNA, 23 bp, synthetic construct
  misc_feature 1..23: note = Synthetic construct
  source 1..23: mol_type = other DNA
cggcagcgaggtccgtcccaccg

SEQ ID NO: 11443 - DNA, 23 bp, synthetic construct
  misc_feature 1..23: note = Synthetic construct
  source 1..23: mol_type = other DNA
ggcagcgaggtccgtcccaccga

SEQ ID NO: 11444 - DNA, 23 bp, synthetic construct
  misc_feature 1..23: note = Synthetic construct
  source 1..23: mol_type = other DNA
gcagcgaggtccgtcccaccgaa

SEQ ID NO: 11445 - DNA, 23 bp, synthetic construct
  misc_feature 1..23: note = Synthetic construct
  source 1..23: mol_type = other DNA
cagcgaggtccgtcccaccgaag

SEQ ID NO: 11446 - DNA, 23 bp, synthetic construct
  misc_feature 1..23: note = Synthetic construct
  source 1..23: mol_type = other DNA
agcgaggtccgtcccaccgaaga

SEQ ID NO: 11447 - DNA, 23 bp, synthetic construct
  misc_feature 1..23: note = Synthetic construct
  source 1..23: mol_type = other DNA
gcgaggtccgtcccaccgaagaa

SEQ ID NO: 11448 - DNA, 23 bp, synthetic construct
  misc_feature 1..23: note = Synthetic construct
  source 1..23: mol_type = other DNA
cgaggtccgtcccaccgaagaac

SEQ ID NO: 11449 - DNA, 23 bp, synthetic construct
  misc_feature 1..23: note = Synthetic construct
  source 1..23: mol_type = other DNA
gaggtccgtcccaccgaagaaca

SEQ ID NO: 11450 - DNA, 23 bp, synthetic construct
  misc_feature 1..23: note = Synthetic construct
  source 1..23: mol_type = other DNA
aggtccgtcccaccgaagaacat

SEQ ID NO: 11451 - DNA, 23 bp, synthetic construct
  misc_feature 1..23: note = Synthetic construct
  source 1..23: mol_type = other DNA
ggtccgtcccaccgaagaacatc

SEQ ID NO: 11452 - DNA, 23 bp, synthetic construct
  misc_feature 1..23: note = Synthetic construct
  source 1..23: mol_type = other DNA
gtccgtcccaccgaagaacatcg

SEQ ID NO: 11453 - DNA, 23 bp, synthetic construct
  misc_feature 1..23: note = Synthetic construct
  source 1..23: mol_type = other DNA
tccgtcccaccgaagaacatcga

SEQ ID NO: 11454 - DNA, 23 bp, synthetic construct
  misc_feature 1..23: note = Synthetic construct
  source 1..23: mol_type = other DNA
ccgtcccaccgaagaacatcgaa

SEQ ID NO: 11455 - DNA, 23 bp, synthetic construct
  misc_feature 1..23: note = Synthetic construct
  source 1..23: mol_type = other DNA
cgtcccaccgaagaacatcgaag

SEQ ID NO: 11456 - DNA, 23 bp, synthetic construct
  misc_feature 1..23: note = Synthetic construct
  source 1..23: mol_type = other DNA
gtcccaccgaagaacatcgaagg

SEQ ID NO: 11457 - DNA, 23 bp, synthetic construct
  misc_feature 1..23: note = Synthetic construct
  source 1..23: mol_type = other DNA
tcccaccgaagaacatcgaaggc

SEQ ID NO: 11458 - DNA, 23 bp, synthetic construct
  misc_feature 1..23: note = Synthetic construct
  source 1..23: mol_type = other DNA
cccaccgaagaacatcgaaggca

SEQ ID NO: 11459 - DNA, 23 bp, synthetic construct
  misc_feature 1..23: note = Synthetic construct
  source 1..23: mol_type = other DNA
ccaccgaagaacatcgaaggcac

SEQ ID NO: 11460 - DNA, 23 bp, synthetic construct
  misc_feature 1..23: note = Synthetic construct
  source 1..23: mol_type = other DNA
caccgaagaacatcgaaggcacc

SEQ ID NO: 11461 - DNA, 23 bp, synthetic construct
  misc_feature 1..23: note = Synthetic construct
  source 1..23: mol_type = other DNA
accgaagaacatcgaaggcacct

SEQ ID NO: 11462 - DNA, 23 bp, synthetic construct
  misc_feature 1..23: note = Synthetic construct
  source 1..23: mol_type = other DNA
ccgaagaacatcgaaggcacctg

SEQ ID NO: 11463 - DNA, 23 bp, synthetic construct
  misc_feature 1..23: note = Synthetic construct
  source 1..23: mol_type = other DNA
cgaagaacatcgaaggcacctgg

SEQ ID NO: 11464 - DNA, 23 bp, synthetic construct
  misc_feature 1..23: note = Synthetic construct
  source 1..23: mol_type = other DNA
gaagaacatcgaaggcacctggg

SEQ ID NO: 11465 - DNA, 23 bp, synthetic construct
  misc_feature 1..23: note = Synthetic construct
  source 1..23: mol_type = other DNA
aagaacatcgaaggcacctggga

SEQ ID NO: 11466 - DNA, 23 bp, synthetic construct
  misc_feature 1..23: note = Synthetic construct
  source 1..23: mol_type = other DNA
agaacatcgaaggcacctgggag

SEQ ID NO: 11467 - DNA, 23 bp, synthetic construct
  misc_feature 1..23: note = Synthetic construct
  source 1..23: mol_type = other DNA
gaacatcgaaggcacctgggagg

SEQ ID NO: 11468 - DNA, 23 bp, synthetic construct
  misc_feature 1..23: note = Synthetic construct
  source 1..23: mol_type = other DNA
aacatcgaaggcacctgggagga

SEQ ID NO: 11469 - DNA, 23 bp, synthetic construct
  misc_feature 1..23: note = Synthetic construct
  source 1..23: mol_type = other DNA
acatcgaaggcacctgggaggag

SEQ ID NO: 11470 - DNA, 23 bp, synthetic construct
  misc_feature 1..23: note = Synthetic construct
  source 1..23: mol_type = other DNA
catcgaaggcacctgggaggaga

SEQ ID NO: 11471 - DNA, 23 bp, synthetic construct
  misc_feature 1..23: note = Synthetic construct
  source 1..23: mol_type = other DNA
atcgaaggcacctgggaggagag

SEQ ID NO: 11472 - DNA, 23 bp, synthetic construct
  misc_feature 1..23: note = Synthetic construct
  source 1..23: mol_type = other DNA
tcgaaggcacctgggaggagagc

SEQ ID NO: 11473 - DNA, 23 bp, synthetic construct
  misc_feature 1..23: note = Synthetic construct
  source 1..23: mol_type = other DNA
cgaaggcacctgggaggagagcc

SEQ ID NO: 11474 - DNA, 23 bp, synthetic construct
  misc_feature 1..23: note = Synthetic construct
  source 1..23: mol_type = other DNA
gaaggcacctgggaggagagccg

SEQ ID NO: 11475 - DNA, 23 bp, synthetic construct
  misc_feature 1..23: note = Synthetic construct
  source 1..23: mol_type = other DNA
aaggcacctgggaggagagccgt

SEQ ID NO: 11476 - DNA, 23 bp, synthetic construct
  misc_feature 1..23: note = Synthetic construct
  source 1..23: mol_type = other DNA
aggcacctgggaggagagccgta

SEQ ID NO: 11477 - DNA, 23 bp, synthetic construct
  misc_feature 1..23: note = Synthetic construct
  source 1..23: mol_type = other DNA
ggcacctgggaggagagccgtac

SEQ ID NO: 11478 - DNA, 23 bp, synthetic construct
  misc_feature 1..23: note = Synthetic construct
  source 1..23: mol_type = other DNA
gcacctgggaggagagccgtacc

SEQ ID NO: 11479 - DNA, 23 bp, synthetic construct
  misc_feature 1..23: note = Synthetic construct
  source 1..23: mol_type = other DNA
cacctgggaggagagccgtaccc

SEQ ID NO: 11480 - DNA, 23 bp, synthetic construct
  misc_feature 1..23: note = Synthetic construct
  source 1..23: mol_type = other DNA
acctgggaggagagccgtaccca

SEQ ID NO: 11481 - DNA, 23 bp, synthetic construct
  misc_feature 1..23: note = Synthetic construct
  source 1..23: mol_type = other DNA
cctgggaggagagccgtacccac

SEQ ID NO: 11482 - DNA, 23 bp, synthetic construct
  misc_feature 1..23: note = Synthetic construct
  source 1..23: mol_type = other DNA
ctgggaggagagccgtacccaca

SEQ ID NO: 11483 - DNA, 23 bp, synthetic construct
  misc_feature 1..23: note = Synthetic construct
  source 1..23: mol_type = other DNA
tgggaggagagccgtacccacac

SEQ ID NO: 11484 - DNA, 23 bp, synthetic construct
  misc_feature 1..23: note = Synthetic construct
  source 1..23: mol_type = other DNA
gggaggagagccgtacccacacc

SEQ ID NO: 11485 - DNA, 23 bp, synthetic construct
  misc_feature 1..23: note = Synthetic construct
  source 1..23: mol_type = other DNA
ggaggagagccgtacccacacct

SEQ ID NO: 11486 - DNA, 23 bp, synthetic construct
  misc_feature 1..23: note = Synthetic construct
  source 1..23: mol_type = other DNA
gaggagagccgtacccacacctt

SEQ ID NO: 11487 - DNA, 23 bp, synthetic construct
  misc_feature 1..23: note = Synthetic construct
  source 1..23: mol_type = other DNA
aggagagccgtacccacacctta

SEQ ID NO: 11488 - DNA, 23 bp, synthetic construct
  misc_feature 1..23: note = Synthetic construct
  source 1..23: mol_type = other DNA
ggagagccgtacccacaccttat

SEQ ID NO: 11489 - DNA, 23 bp, synthetic construct
  misc_feature 1..23: note = Synthetic construct
  source 1..23: mol_type = other DNA
gagagccgtacccacaccttata

SEQ ID NO: 11490 - DNA, 23 bp, synthetic construct
  misc_feature 1..23: note = Synthetic construct
  source 1..23: mol_type = other DNA
agagccgtacccacaccttatag

SEQ ID NO: 11491 - DNA, 23 bp, synthetic construct
  misc_feature 1..23: note = Synthetic construct
  source 1..23: mol_type = other DNA
gagccgtacccacaccttataga

SEQ ID NO: 11492 - DNA, 23 bp, synthetic construct
  misc_feature 1..23: note = Synthetic construct
  source 1..23: mol_type = other DNA
agccgtacccacaccttatagag

SEQ ID NO: 11493 - DNA, 23 bp, synthetic construct
  misc_feature 1..23: note = Synthetic construct
  source 1..23: mol_type = other DNA
gccgtacccacaccttatagagg

SEQ ID NO: 11494 - DNA, 23 bp, synthetic construct
  misc_feature 1..23: note = Synthetic construct
  source 1..23: mol_type = other DNA
ccgtacccacaccttatagaggc

SEQ ID NO: 11495 - DNA, 23 bp, synthetic construct
  misc_feature 1..23: note = Synthetic construct
  source 1..23: mol_type = other DNA
cgtacccacaccttatagaggcg

SEQ ID NO: 11496 - DNA, 23 bp, synthetic construct
  misc_feature 1..23: note = Synthetic construct
  source 1..23: mol_type = other DNA
gtacccacaccttatagaggcgt

SEQ ID NO: 11497 - DNA, 23 bp, synthetic construct
  misc_feature 1..23: note = Synthetic construct
  source 1..23: mol_type = other DNA
tacccacaccttatagaggcgtg

SEQ ID NO: 11498 - DNA, 23 bp, synthetic construct
  misc_feature 1..23: note = Synthetic construct
  source 1..23: mol_type = other DNA
acccacaccttatagaggcgtgg

SEQ ID NO: 11499 - DNA, 23 bp, synthetic construct
  misc_feature 1..23: note = Synthetic construct
  source 1..23: mol_type = other DNA
cccacaccttatagaggcgtgga

SEQ ID NO: 11500 - DNA, 23 bp, synthetic construct
  misc_feature 1..23: note = Synthetic construct
  source 1..23: mol_type = other DNA
ccacaccttatagaggcgtggat

SEQ ID NO: 11501 - DNA, 23 bp, synthetic construct
  misc_feature 1..23: note = Synthetic construct
  source 1..23: mol_type = other DNA
cacaccttatagaggcgtggatc

SEQ ID NO: 11502 - DNA, 23 bp, synthetic construct
  misc_feature 1..23: note = Synthetic construct
  source 1..23: mol_type = other DNA
acaccttatagaggcgtggatct

SEQ ID NO: 11503 - DNA, 23 bp, synthetic construct
  misc_feature 1..23: note = Synthetic construct
  source 1..23: mol_type = other DNA
caccttatagaggcgtggatctg

SEQ ID NO: 11504 - DNA, 23 bp, synthetic construct
  misc_feature 1..23: note = Synthetic construct
  source 1..23: mol_type = other DNA
accttatagaggcgtggatctga

SEQ ID NO: 11505 - DNA, 23 bp, synthetic construct
  misc_feature 1..23: note = Synthetic construct
  source 1..23: mol_type = other DNA
ccttatagaggcgtggatctgac

SEQ ID NO: 11506 - DNA, 23 bp, synthetic construct
  misc_feature 1..23: note = Synthetic construct
  source 1..23: mol_type = other DNA
cttatagaggcgtggatctgaca

SEQ ID NO: 11507 - DNA, 23 bp, synthetic construct
  misc_feature 1..23: note = Synthetic construct
  source 1..23: mol_type = other DNA
ttatagaggcgtggatctgacat

SEQ ID NO: 11508 - DNA, 23 bp, synthetic construct
  misc_feature 1..23: note = Synthetic construct
  source 1..23: mol_type = other DNA
tatagaggcgtggatctgacata

SEQ ID NO: 11509 - DNA, 23 bp, synthetic construct
  misc_feature 1..23: note = Synthetic construct
  source 1..23: mol_type = other DNA
atagaggcgtggatctgacatac

SEQ ID NO: 11510 - DNA, 23 bp, synthetic construct
  misc_feature 1..23: note = Synthetic construct
  source 1..23: mol_type = other DNA
tagaggcgtggatctgacatacc

SEQ ID NO: 11511 - DNA, 23 bp, synthetic construct
  misc_feature 1..23: note = Synthetic construct
  source 1..23: mol_type = other DNA
agaggcgtggatctgacatacct

SEQ ID NO: 11512 - DNA, 23 bp, synthetic construct
  misc_feature 1..23: note = Synthetic construct
  source 1..23: mol_type = other DNA
gaggcgtggatctgacatacctc

SEQ ID NO: 11513 - DNA, 23 bp, synthetic construct
  misc_feature 1..23: note = Synthetic construct
  source 1..23: mol_type = other DNA
aggcgtggatctgacatacctcc

SEQ ID NO: 11514 - DNA, 23 bp, synthetic construct
  misc_feature 1..23: note = Synthetic construct
  source 1..23: mol_type = other DNA
ggcgtggatctgacatacctccg

SEQ ID NO: 11515 - DNA, 23 bp, synthetic construct
  misc_feature 1..23: note = Synthetic construct
  source 1..23: mol_type = other DNA
gcgtggatctgacatacctccga

SEQ ID NO: 11516 - DNA, 23 bp, synthetic construct
  misc_feature 1..23: note = Synthetic construct
  source 1..23: mol_type = other DNA
cgtggatctgacatacctccgac

SEQ ID NO: 11517 - DNA, 23 bp, synthetic construct
  misc_feature 1..23: note = Synthetic construct
  source 1..23: mol_type = other DNA
gtggatctgacatacctccgaca

SEQ ID NO: 11518 - DNA, 23 bp, synthetic construct
  misc_feature 1..23: note = Synthetic construct
  source 1..23: mol_type = other DNA
tggatctgacatacctccgacaa

SEQ ID NO: 11519 - DNA, 23 bp, synthetic construct
  misc_feature 1..23: note = Synthetic construct
  source 1..23: mol_type = other DNA
ggatctgacatacctccgacaac

SEQ ID NO: 11520 - DNA, 23 bp, synthetic construct
  misc_feature 1..23: note = Synthetic construct
  source 1..23: mol_type = other DNA
gatctgacatacctccgacaact

SEQ ID NO: 11521 - DNA, 23 bp, synthetic construct
  misc_feature 1..23: note = Synthetic construct
  source 1..23: mol_type = other DNA
atctgacatacctccgacaactc

SEQ ID NO: 11522 - DNA, 23 bp, synthetic construct
  misc_feature 1..23: note = Synthetic construct
  source 1..23: mol_type = other DNA
tctgacatacctccgacaactcc

SEQ ID NO: 11523 - DNA, 23 bp, synthetic construct
  misc_feature 1..23: note = Synthetic construct
  source 1..23: mol_type = other DNA
ctgacatacctccgacaactccc

SEQ ID NO: 11524 - DNA, 23 bp, synthetic construct
  misc_feature 1..23: note = Synthetic construct
  source 1..23: mol_type = other DNA
tgacatacctccgacaactcccc

SEQ ID NO: 11525 - DNA, 23 bp, synthetic construct
  misc_feature 1..23: note = Synthetic construct
  source 1..23: mol_type = other DNA
gacatacctccgacaactcccca

SEQ ID NO: 11526 - DNA, 23 bp, synthetic construct
  misc_feature 1..23: note = Synthetic construct
  source 1..23: mol_type = other DNA
acatacctccgacaactccccaa

SEQ ID NO: 11527 - DNA, 23 bp, synthetic construct
  misc_feature 1..23: note = Synthetic construct
  source 1..23: mol_type = other DNA
catacctccgacaactccccaac

SEQ ID NO: 11528 - DNA, 23 bp, synthetic construct
  misc_feature 1..23: note = Synthetic construct
  source 1..23: mol_type = other DNA
atacctccgacaactccccaacc

SEQ ID NO: 11529 - DNA, 23 bp, synthetic construct
  misc_feature 1..23: note = Synthetic construct
  source 1..23: mol_type = other DNA
tacctccgacaactccccaaccc

SEQ ID NO: 11530 - DNA, 23 bp, synthetic construct
  misc_feature 1..23: note = Synthetic construct
  source 1..23: mol_type = other DNA
acctccgacaactccccaacccc

SEQ ID NO: 11531 - DNA, 23 bp, synthetic construct
  misc_feature 1..23: note = Synthetic construct
  source 1..23: mol_type = other DNA
cctccgacaactccccaaccccg

SEQ ID NO: 11532 - DNA, 23 bp, synthetic construct
  misc_feature 1..23: note = Synthetic construct
  source 1..23: mol_type = other DNA
ctccgacaactccccaaccccgt

SEQ ID NO: 11533 - DNA, 23 bp, synthetic construct
  misc_feature 1..23: note = Synthetic construct
  source 1..23: mol_type = other DNA
tccgacaactccccaaccccgta

SEQ ID NO: 11534 - DNA, 23 bp, synthetic construct
  misc_feature 1..23: note = Synthetic construct
  source 1..23: mol_type = other DNA
ccgacaactccccaaccccgtag

SEQ ID NO: 11535 - DNA, 23 bp, synthetic construct
  misc_feature 1..23: note = Synthetic construct
  source 1..23: mol_type = other DNA
cgacaactccccaaccccgtagc

SEQ ID NO: 11536 - DNA, 23 bp, synthetic construct
  misc_feature 1..23: note = Synthetic construct
  source 1..23: mol_type = other DNA
gacaactccccaaccccgtagcc

SEQ ID NO: 11537 - DNA, 23 bp, synthetic construct
  misc_feature 1..23: note = Synthetic construct
  source 1..23: mol_type = other DNA
acaactccccaaccccgtagccg

SEQ ID NO: 11538 - DNA, 23 bp, synthetic construct
  misc_feature 1..23: note = Synthetic construct
  source 1..23: mol_type = other DNA
caactccccaaccccgtagccga

SEQ ID NO: 11539 - DNA, 23 bp, synthetic construct
  misc_feature 1..23: note = Synthetic construct
  source 1..23: mol_type = other DNA
aactccccaaccccgtagccgat

SEQ ID NO: 11540 - DNA, 23 bp, synthetic construct
  misc_feature 1..23: note = Synthetic construct
  source 1..23: mol_type = other DNA
actccccaaccccgtagccgatt

SEQ ID NO: 11541 - DNA, 23 bp, synthetic construct
  misc_feature 1..23: note = Synthetic construct
  source 1..23: mol_type = other DNA
ctccccaaccccgtagccgattt

SEQ ID NO: 11542 - DNA, 23 bp, synthetic construct
  misc_feature 1..23: note = Synthetic construct
  source 1..23: mol_type = other DNA
tccccaaccccgtagccgattta

SEQ ID NO: 11543 - DNA, 23 bp, synthetic construct
  misc_feature 1..23: note = Synthetic construct
  source 1..23: mol_type = other DNA
ccccaaccccgtagccgatttaa

SEQ ID NO: 11544 - DNA, 23 bp, synthetic construct
  misc_feature 1..23: note = Synthetic construct
  source 1..23: mol_type = other DNA
cccaaccccgtagccgatttaat

SEQ ID NO: 11545 - DNA, 23 bp, synthetic construct
  misc_feature 1..23: note = Synthetic construct
  source 1..23: mol_type = other DNA
ccaaccccgtagccgatttaata

SEQ ID NO: 11546 - DNA, 23 bp, synthetic construct
  misc_feature 1..23: note = Synthetic construct
  source 1..23: mol_type = other DNA
caaccccgtagccgatttaatat

SEQ ID NO: 11547 - DNA, 23 bp, synthetic construct
  misc_feature 1..23: note = Synthetic construct
  source 1..23: mol_type = other DNA
aaccccgtagccgatttaatatc

SEQ ID NO: 11548 - DNA, 23 bp, synthetic construct
  misc_feature 1..23: note = Synthetic construct
  source 1..23: mol_type = other DNA
accccgtagccgatttaatatca

SEQ ID NO: 11549 - DNA, 23 bp, synthetic construct
  misc_feature 1..23: note = Synthetic construct
  source 1..23: mol_type = other DNA
ccccgtagccgatttaatatcag

SEQ ID NO: 11550 - DNA, 23 bp, synthetic construct
  misc_feature 1..23: note = Synthetic construct
  source 1..23: mol_type = other DNA
cccgtagccgatttaatatcagc

SEQ ID NO: 11551 - DNA, 23 bp, synthetic construct
  misc_feature 1..23: note = Synthetic construct
  source 1..23: mol_type = other DNA
ccgtagccgatttaatatcagca

SEQ ID NO: 11552 - DNA, 23 bp, synthetic construct
  misc_feature 1..23: note = Synthetic construct
  source 1..23: mol_type = other DNA
cgtagccgatttaatatcagcat

SEQ ID NO: 11553 - DNA, 23 bp, synthetic construct
  misc_feature 1..23: note = Synthetic construct
  source 1..23: mol_type = other DNA
gtagccgatttaatatcagcatc

SEQ ID NO: 11554 - DNA, 23 bp, synthetic construct
  misc_feature 1..23: note = Synthetic construct
  source 1..23: mol_type = other DNA
tagccgatttaatatcagcatca

SEQ ID NO: 11555 - DNA, 23 bp, synthetic construct
  misc_feature 1..23: note = Synthetic construct
  source 1..23: mol_type = other DNA
agccgatttaatatcagcatcag

SEQ ID NO: 11556 - DNA, 23 bp, synthetic construct
  misc_feature 1..23: note = Synthetic construct
  source 1..23: mol_type = other DNA
gccgatttaatatcagcatcagg

SEQ ID NO: 11557 - DNA, 23 bp, synthetic construct
  misc_feature 1..23: note = Synthetic construct
  source 1..23: mol_type = other DNA
ccgatttaatatcagcatcaggg

SEQ ID NO: 11558 - DNA, 23 bp, synthetic construct
  misc_feature 1..23: note = Synthetic construct
  source 1..23: mol_type = other DNA
cgatttaatatcagcatcagggc

SEQ ID NO: 11559 - DNA, 23 bp, synthetic construct
  misc_feature 1..23: note = Synthetic construct
  source 1..23: mol_type = other DNA
gatttaatatcagcatcagggcg

SEQ ID NO: 11560 - DNA, 23 bp, synthetic construct
  misc_feature 1..23: note = Synthetic construct
  source 1..23: mol_type = other DNA
atttaatatcagcatcagggcga

SEQ ID NO: 11561 - DNA, 23 bp, synthetic construct
  misc_feature 1..23: note = Synthetic construct
  source 1..23: mol_type = other DNA
tttaatatcagcatcagggcgaa

SEQ ID NO: 11562 - DNA, 23 bp, synthetic construct
  misc_feature 1..23: note = Synthetic construct
  source 1..23: mol_type = other DNA
ttaatatcagcatcagggcgaag

SEQ ID NO: 11563 - DNA, 23 bp, synthetic construct
  misc_feature 1..23: note = Synthetic construct
  source 1..23: mol_type = other DNA
taatatcagcatcagggcgaaga

SEQ ID NO: 11564 - DNA, 23 bp, synthetic construct
  misc_feature 1..23: note = Synthetic construct
  source 1..23: mol_type = other DNA
aatatcagcatcagggcgaagag

SEQ ID NO: 11565 - DNA, 23 bp, synthetic construct
  misc_feature 1..23: note = Synthetic construct
  source 1..23: mol_type = other DNA
atatcagcatcagggcgaagaga

SEQ ID NO: 11566 - DNA, 23 bp, synthetic construct
  misc_feature 1..23: note = Synthetic construct
  source 1..23: mol_type = other DNA
tatcagcatcagggcgaagagat

SEQ ID NO: 11567 - DNA, 23 bp, synthetic construct
  misc_feature 1..23: note = Synthetic construct
  source 1..23: mol_type = other DNA
atcagcatcagggcgaagagatt

SEQ ID NO: 11568 - DNA, 23 bp, synthetic construct
  misc_feature 1..23: note = Synthetic construct
  source 1..23: mol_type = other DNA
tcagcatcagggcgaagagattg

SEQ ID NO: 11569 - DNA, 23 bp, synthetic construct
  misc_feature 1..23: note = Synthetic construct
  source 1..23: mol_type = other DNA
cagcatcagggcgaagagattgt

SEQ ID NO: 11570 - DNA, 23 bp, synthetic construct
  misc_feature 1..23: note = Synthetic construct
  source 1..23: mol_type = other DNA
agcatcagggcgaagagattgtc

SEQ ID NO: 11571 - DNA, 23 bp, synthetic construct
  misc_feature 1..23: note = Synthetic construct
  source 1..23: mol_type = other DNA
gcatcagggcgaagagattgtca

SEQ ID NO: 11572 - DNA, 23 bp, synthetic construct
  misc_feature 1..23: note = Synthetic construct
  source 1..23: mol_type = other DNA
catcagggcgaagagattgtcaa

SEQ ID NO: 11573 - DNA, 23 bp, synthetic construct
  misc_feature 1..23: note = Synthetic construct
  source 1..23: mol_type = other DNA
atcagggcgaagagattgtcaac

SEQ ID NO: 11574 - DNA, 23 bp, synthetic construct
  misc_feature 1..23: note = Synthetic construct
  source 1..23: mol_type = other DNA
tcagggcgaagagattgtcaaca

SEQ ID NO: 11575 - DNA, 23 bp, synthetic construct
  misc_feature 1..23: note = Synthetic construct
  source 1..23: mol_type = other DNA
cagggcgaagagattgtcaacag

SEQ ID NO: 11576 - DNA, 23 bp, synthetic construct
  misc_feature 1..23: note = Synthetic construct
  source 1..23: mol_type = other DNA
agggcgaagagattgtcaacagg

SEQ ID NO: 11577 - DNA, 23 bp, synthetic construct
  misc_feature 1..23: note = Synthetic construct
  source 1..23: mol_type = other DNA
gggcgaagagattgtcaacaggt

SEQ ID NO: 11578 - DNA, 23 bp, synthetic construct
  misc_feature 1..23: note = Synthetic construct
  source 1..23: mol_type = other DNA
ggcgaagagattgtcaacaggtt

SEQ ID NO: 11579 - DNA, 23 bp, synthetic construct
  misc_feature 1..23: note = Synthetic construct
  source 1..23: mol_type = other DNA
gcgaagagattgtcaacaggttt

SEQ ID NO: 11580 - DNA, 23 bp, synthetic construct
  misc_feature 1..23: note = Synthetic construct
  source 1..23: mol_type = other DNA
cgaagagattgtcaacaggtttc

SEQ ID NO: 11581 - DNA, 23 bp, synthetic construct
  misc_feature 1..23: note = Synthetic construct
  source 1..23: mol_type = other DNA
gaagagattgtcaacaggtttct

SEQ ID NO: 11582 - DNA, 23 bp, synthetic construct
  misc_feature 1..23: note = Synthetic construct
  source 1..23: mol_type = other DNA
aagagattgtcaacaggtttctt

SEQ ID NO: 11583 - DNA, 23 bp, synthetic construct
  misc_feature 1..23: note = Synthetic construct
  source 1..23: mol_type = other DNA
agagattgtcaacaggtttcttg

SEQ ID NO: 11584 - DNA, 23 bp, synthetic construct
  misc_feature 1..23: note = Synthetic construct
  source 1..23: mol_type = other DNA
gagattgtcaacaggtttcttga

SEQ ID NO: 11585 - DNA, 23 bp, synthetic construct
  misc_feature 1..23: note = Synthetic construct
  source 1..23: mol_type = other DNA
agattgtcaacaggtttcttgat

SEQ ID NO: 11586 - DNA, 23 bp, synthetic construct
  misc_feature 1..23: note = Synthetic construct
  source 1..23: mol_type = other DNA
gattgtcaacaggtttcttgatg

SEQ ID NO: 11587 - DNA, 23 bp, synthetic construct
  misc_feature 1..23: note = Synthetic construct
  source 1..23: mol_type = other DNA
attgtcaacaggtttcttgatgt

SEQ ID NO: 11588 - DNA, 23 bp, synthetic construct
  misc_feature 1..23: note = Synthetic construct
  source 1..23: mol_type = other DNA
ttgtcaacaggtttcttgatgta

SEQ ID NO: 11589 - DNA, 23 bp, synthetic construct
  misc_feature 1..23: note = Synthetic construct
  source 1..23: mol_type = other DNA
tgtcaacaggtttcttgatgtaa

SEQ ID NO: 11590 - DNA, 23 bp, synthetic construct
  misc_feature 1..23: note = Synthetic construct
  source 1..23: mol_type = other DNA
gtcaacaggtttcttgatgtaaa

SEQ ID NO: 11591 - DNA, 23 bp, synthetic construct
  misc_feature 1..23: note = Synthetic construct
  source 1..23: mol_type = other DNA
tcaacaggtttcttgatgtaaaa

SEQ ID NO: 11592 - DNA, 23 bp, synthetic construct
  misc_feature 1..23: note = Synthetic construct
  source 1..23: mol_type = other DNA
caacaggtttcttgatgtaaaac

SEQ ID NO: 11593 - DNA, 23 bp, synthetic construct
  misc_feature 1..23: note = Synthetic construct
  source 1..23: mol_type = other DNA
aacaggtttcttgatgtaaaacg

SEQ ID NO: 11594 - DNA, 23 bp, synthetic construct
  misc_feature 1..23: note = Synthetic construct
  source 1..23: mol_type = other DNA
acaggtttcttgatgtaaaacgg

SEQ ID NO: 11595 - DNA, 23 bp, synthetic construct
  misc_feature 1..23: note = Synthetic construct
  source 1..23: mol_type = other DNA
caggtttcttgatgtaaaacggt

SEQ ID NO: 11596 - DNA, 23 bp, synthetic construct
  misc_feature 1..23: note = Synthetic construct
  source 1..23: mol_type = other DNA
aggtttcttgatgtaaaacggtt

SEQ ID NO: 11597 - DNA, 23 bp, synthetic construct
  misc_feature 1..23: note = Synthetic construct
  source 1..23: mol_type = other DNA
ggtttcttgatgtaaaacggttt

SEQ ID NO: 11598 - DNA, 23 bp, synthetic construct
  misc_feature 1..23: note = Synthetic construct
  source 1..23: mol_type = other DNA
gtttcttgatgtaaaacggtttg

SEQ ID NO: 11599 - DNA, 23 bp, synthetic construct
  misc_feature 1..23: note = Synthetic construct
  source 1..23: mol_type = other DNA
tttcttgatgtaaaacggtttga

SEQ ID NO: 11600 - DNA, 23 bp, synthetic construct
  misc_feature 1..23: note = Synthetic construct
  source 1..23: mol_type = other DNA
ttcttgatgtaaaacggtttgac

SEQ ID NO: 11601 - DNA, 23 bp, synthetic construct
  misc_feature 1..23: note = Synthetic construct
  source 1..23: mol_type = other DNA
tcttgatgtaaaacggtttgaca

SEQ ID NO: 11602 - DNA, 23 bp, synthetic construct
  misc_feature 1..23: note = Synthetic construct
  source 1..23: mol_type = other DNA
cttgatgtaaaacggtttgacat

SEQ ID NO: 11603 - DNA, 23 bp, synthetic construct
  misc_feature 1..23: note = Synthetic construct
  source 1..23: mol_type = other DNA
ttgatgtaaaacggtttgacatc

SEQ ID NO: 11604 - DNA, 23 bp, synthetic construct
  misc_feature 1..23: note = Synthetic construct
  source 1..23: mol_type = other DNA
tgatgtaaaacggtttgacatcg

SEQ ID NO: 11605 - DNA, 23 bp, synthetic construct
  misc_feature 1..23: note = Synthetic construct
  source 1..23: mol_type = other DNA
gatgtaaaacggtttgacatcga

SEQ ID NO: 11606 - DNA, 23 bp, synthetic construct
  misc_feature 1..23: note = Synthetic construct
  source 1..23: mol_type = other DNA
atgtaaaacggtttgacatcgac

SEQ ID NO: 11607 - DNA, 23 bp, synthetic construct
  misc_feature 1..23: note = Synthetic construct
  source 1..23: mol_type = other DNA
tgtaaaacggtttgacatcgaca

SEQ ID NO: 11608 - DNA, 23 bp, synthetic construct
  misc_feature 1..23: note = Synthetic construct
  source 1..23: mol_type = other DNA
gtaaaacggtttgacatcgacac

SEQ ID NO: 11609 - DNA, 23 bp, synthetic construct
  misc_feature 1..23: note = Synthetic construct
  source 1..23: mol_type = other DNA
taaaacggtttgacatcgacacc

SEQ ID NO: 11610 - DNA, 23 bp, synthetic construct
  misc_feature 1..23: note = Synthetic construct
  source 1..23: mol_type = other DNA
aaaacggtttgacatcgacacca

SEQ ID NO: 11611 - DNA, 23 bp, synthetic construct
  misc_feature 1..23: note = Synthetic construct
  source 1..23: mol_type = other DNA
aaacggtttgacatcgacaccac

SEQ ID NO: 11612 - DNA, 23 bp, synthetic construct
  misc_feature 1..23: note = Synthetic construct
  source 1..23: mol_type = other DNA
aacggtttgacatcgacaccacg

SEQ ID NO: 11613 - DNA, 23 bp, synthetic construct
  misc_feature 1..23: note = Synthetic construct
  source 1..23: mol_type = other DNA
acggtttgacatcgacaccacgg

SEQ ID NO: 11614 - DNA, 23 bp, synthetic construct
  misc_feature 1..23: note = Synthetic construct
  source 1..23: mol_type = other DNA
cggtttgacatcgacaccacggt

SEQ ID NO: 11615 - DNA, 23 bp, synthetic construct
  misc_feature 1..23: note = Synthetic construct
  source 1..23: mol_type = other DNA
ggtttgacatcgacaccacggta

SEQ ID NO: 11616 - DNA, 23 bp, synthetic construct
  misc_feature 1..23: note = Synthetic construct
  source 1..23: mol_type = other DNA
gtttgacatcgacaccacggtaa

SEQ ID NO: 11617 - DNA, 23 bp, synthetic construct
  misc_feature 1..23: note = Synthetic construct
  source 1..23: mol_type = other DNA
tttgacatcgacaccacggtaaa

SEQ ID NO: 11618 - DNA, 23 bp, synthetic construct
  misc_feature 1..23: note = Synthetic construct
  source 1..23: mol_type = other DNA
ttgacatcgacaccacggtaaaa

SEQ ID NO: 11619 - DNA, 23 bp, synthetic construct
  misc_feature 1..23: note = Synthetic construct
  source 1..23: mol_type = other DNA
tgacatcgacaccacggtaaaag

SEQ ID NO: 11620 - DNA, 23 bp, synthetic construct
  misc_feature 1..23: note = Synthetic construct
  source 1..23: mol_type = other DNA
gacatcgacaccacggtaaaagt

SEQ ID NO: 11621 - DNA, 23 bp, synthetic construct
  misc_feature 1..23: note = Synthetic construct
  source 1..23: mol_type = other DNA
acatcgacaccacggtaaaagtg

SEQ ID NO: 11622 - DNA, 23 bp, synthetic construct
  misc_feature 1..23: note = Synthetic construct
  source 1..23: mol_type = other DNA
catcgacaccacggtaaaagtgc

SEQ ID NO: 11623 - DNA, 23 bp, synthetic construct
  misc_feature 1..23: note = Synthetic construct
  source 1..23: mol_type = other DNA
atcgacaccacggtaaaagtgcg

SEQ ID NO: 11624 - DNA, 23 bp, synthetic construct
  misc_feature 1..23: note = Synthetic construct
  source 1..23: mol_type = other DNA
tcgacaccacggtaaaagtgcgc

SEQ ID NO: 11625 - DNA, 23 bp, synthetic construct
  misc_feature 1..23: note = Synthetic construct
  source 1..23: mol_type = other DNA
cgacaccacggtaaaagtgcgcg

SEQ ID NO: 11626 - DNA, 23 bp, synthetic construct
  misc_feature 1..23: note = Synthetic construct
  source 1..23: mol_type = other DNA
gacaccacggtaaaagtgcgcgc

SEQ ID NO: 11627 - DNA, 23 bp, synthetic construct
  misc_feature 1..23: note = Synthetic construct
  source 1..23: mol_type = other DNA
acaccacggtaaaagtgcgcgcc

SEQ ID NO: 11628 - DNA, 23 bp, synthetic construct
  misc_feature 1..23: note = Synthetic construct
  source 1..23: mol_type = other DNA
caccacggtaaaagtgcgcgccg

SEQ ID NO: 11629 - DNA, 23 bp, synthetic construct
  misc_feature 1..23: note = Synthetic construct
  source 1..23: mol_type = other DNA
accacggtaaaagtgcgcgccgc

SEQ ID NO: 11630 - DNA, 23 bp, synthetic construct
  misc_feature 1..23: note = Synthetic construct
  source 1..23: mol_type = other DNA
ccacggtaaaagtgcgcgccgca

SEQ ID NO: 11631 - DNA, 23 bp, synthetic construct
  misc_feature 1..23: note = Synthetic construct
  source 1..23: mol_type = other DNA
cacggtaaaagtgcgcgccgcag

SEQ ID NO: 11632 - DNA, 23 bp, synthetic construct
  misc_feature 1..23: note = Synthetic construct
  source 1..23: mol_type = other DNA
acggtaaaagtgcgcgccgcagc

SEQ ID NO: 11633 - DNA, 23 bp, synthetic construct
  misc_feature 1..23: note = Synthetic construct
  source 1..23: mol_type = other DNA
cggtaaaagtgcgcgccgcagct

SEQ ID NO: 11634 - DNA, 23 bp, synthetic construct
  misc_feature 1..23: note = Synthetic construct
  source 1..23: mol_type = other DNA
ggtaaaagtgcgcgccgcagctc

SEQ ID NO: 11635 - DNA, 23 bp, synthetic construct
  misc_feature 1..23: note = Synthetic construct
  source 1..23: mol_type = other DNA
gtaaaagtgcgcgccgcagctct

SEQ ID NO: 11636 - DNA, 23 bp, synthetic construct
  misc_feature 1..23: note = Synthetic construct
  source 1..23: mol_type = other DNA
taaaagtgcgcgccgcagctctc

SEQ ID NO: 11637 - DNA, 23 bp, synthetic construct
  misc_feature 1..23: note = Synthetic construct
  source 1..23: mol_type = other DNA
aaaagtgcgcgccgcagctctcg

SEQ ID NO: 11638 - DNA, 23 bp, synthetic construct
  misc_feature 1..23: note = Synthetic construct
  source 1..23: mol_type = other DNA
aaagtgcgcgccgcagctctcgc

SEQ ID NO: 11639 - DNA, 23 bp, synthetic construct
  misc_feature 1..23: note = Synthetic construct
  source 1..23: mol_type = other DNA
aagtgcgcgccgcagctctcgcg

SEQ ID NO: 11640 - DNA, 23 bp, synthetic construct
  misc_feature 1..23: note = Synthetic construct
  source 1..23: mol_type = other DNA
agtgcgcgccgcagctctcgcga

SEQ ID NO: 11641 - DNA, 23 bp, synthetic construct
  misc_feature 1..23: note = Synthetic construct
  source 1..23: mol_type = other DNA
gtgcgcgccgcagctctcgcgaa

SEQ ID NO: 11642 - DNA, 23 bp, synthetic construct
  misc_feature 1..23: note = Synthetic construct
  source 1..23: mol_type = other DNA
tgcgcgccgcagctctcgcgaaa

SEQ ID NO: 11643 - DNA, 23 bp, synthetic construct
  misc_feature 1..23: note = Synthetic construct
  source 1..23: mol_type = other DNA
gcgcgccgcagctctcgcgaaag

SEQ ID NO: 11644 - DNA, 23 bp, synthetic construct
  misc_feature 1..23: note = Synthetic construct
  source 1..23: mol_type = other DNA
cgcgccgcagctctcgcgaaaga

SEQ ID NO: 11645 - DNA, 23 bp, synthetic construct
  misc_feature 1..23: note = Synthetic construct
  source 1..23: mol_type = other DNA
gcgccgcagctctcgcgaaagag

SEQ ID NO: 11646 - DNA, 23 bp, synthetic construct
  misc_feature 1..23: note = Synthetic construct
  source 1..23: mol_type = other DNA
cgccgcagctctcgcgaaagagc

SEQ ID NO: 11647 - DNA, 23 bp, synthetic construct
  misc_feature 1..23: note = Synthetic construct
  source 1..23: mol_type = other DNA
gccgcagctctcgcgaaagagcc

SEQ ID NO: 11648 - DNA, 23 bp, synthetic construct
  misc_feature 1..23: note = Synthetic construct
  source 1..23: mol_type = other DNA
ccgcagctctcgcgaaagagccc

SEQ ID NO: 11649 - DNA, 23 bp, synthetic construct
  misc_feature 1..23: note = Synthetic construct
  source 1..23: mol_type = other DNA
cgcagctctcgcgaaagagcccg

SEQ ID NO: 11650 - DNA, 23 bp, synthetic construct
  misc_feature 1..23: note = Synthetic construct
  source 1..23: mol_type = other DNA
gcagctctcgcgaaagagcccgg

SEQ ID NO: 11651 - DNA, 23 bp, synthetic construct
  misc_feature 1..23: note = Synthetic construct
  source 1..23: mol_type = other DNA
cagctctcgcgaaagagcccgga

SEQ ID NO: 11652 - DNA, 23 bp, synthetic construct
  misc_feature 1..23: note = Synthetic construct
  source 1..23: mol_type = other DNA
agctctcgcgaaagagcccggac

SEQ ID NO: 11653 - DNA, 23 bp, synthetic construct
  misc_feature 1..23: note = Synthetic construct
  source 1..23: mol_type = other DNA
gctctcgcgaaagagcccggaca

SEQ ID NO: 11654 - DNA, 23 bp, synthetic construct
  misc_feature 1..23: note = Synthetic construct
  source 1..23: mol_type = other DNA
ctctcgcgaaagagcccggacac

SEQ ID NO: 11655 - DNA, 23 bp, synthetic construct
  misc_feature 1..23: note = Synthetic construct
  source 1..23: mol_type = other DNA
tctcgcgaaagagcccggacacg

SEQ ID NO: 11656 - DNA, 23 bp, synthetic construct
  misc_feature 1..23: note = Synthetic construct
  source 1..23: mol_type = other DNA
ctcgcgaaagagcccggacacga

SEQ ID NO: 11657 - DNA, 23 bp, synthetic construct
  misc_feature 1..23: note = Synthetic construct
  source 1..23: mol_type = other DNA
tcgcgaaagagcccggacacgaa

SEQ ID NO: 11658 - DNA, 23 bp, synthetic construct
  misc_feature 1..23: note = Synthetic construct
  source 1..23: mol_type = other DNA
cgcgaaagagcccggacacgaac

SEQ ID NO: 11659 - DNA, 23 bp, synthetic construct
  misc_feature 1..23: note = Synthetic construct
  source 1..23: mol_type = other DNA
gcgaaagagcccggacacgaacg

SEQ ID NO: 11660 - DNA, 23 bp, synthetic construct
  misc_feature 1..23: note = Synthetic construct
  source 1..23: mol_type = other DNA
cgaaagagcccggacacgaacgt

SEQ ID NO: 11661 - DNA, 23 bp, synthetic construct
  misc_feature 1..23: note = Synthetic construct
  source 1..23: mol_type = other DNA
gaaagagcccggacacgaacgtt

SEQ ID NO: 11662 - DNA, 23 bp, synthetic construct
  misc_feature 1..23: note = Synthetic construct
  source 1..23: mol_type = other DNA
aaagagcccggacacgaacgttt

SEQ ID NO: 11663 - DNA, 23 bp, synthetic construct
  misc_feature 1..23: note = Synthetic construct
  source 1..23: mol_type = other DNA
aagagcccggacacgaacgtttt

SEQ ID NO: 11664 - DNA, 23 bp, synthetic construct
  misc_feature 1..23: note = Synthetic construct
  source 1..23: mol_type = other DNA
agagcccggacacgaacgtttta

SEQ ID NO: 11665 - DNA, 23 bp, synthetic construct
  misc_feature 1..23: note = Synthetic construct
  source 1..23: mol_type = other DNA
gagcccggacacgaacgttttac

SEQ ID NO: 11666 - DNA, 23 bp, synthetic construct
  misc_feature 1..23: note = Synthetic construct
  source 1..23: mol_type = other DNA
agcccggacacgaacgttttacg

SEQ ID NO: 11667 - DNA, 23 bp, synthetic construct
  misc_feature 1..23: note = Synthetic construct
  source 1..23: mol_type = other DNA
gcccggacacgaacgttttacga

SEQ ID NO: 11668 - DNA, 23 bp, synthetic construct
  misc_feature 1..23: note = Synthetic construct
  source 1..23: mol_type = other DNA
cccggacacgaacgttttacgaa

SEQ ID NO: 11669 - DNA, 23 bp, synthetic construct
  misc_feature 1..23: note = Synthetic construct
  source 1..23: mol_type = other DNA
ccggacacgaacgttttacgaag

SEQ ID NO: 11670 - DNA, 23 bp, synthetic construct
  misc_feature 1..23: note = Synthetic construct
  source 1..23: mol_type = other DNA
cggacacgaacgttttacgaaga

SEQ ID NO: 11671 - DNA, 23 bp, synthetic construct
  misc_feature 1..23: note = Synthetic construct
  source 1..23: mol_type = other DNA
ggacacgaacgttttacgaagat

SEQ ID NO: 11672 - DNA, 23 bp, synthetic construct
  misc_feature 1..23: note = Synthetic construct
  source 1..23: mol_type = other DNA
gacacgaacgttttacgaagatt

SEQ ID NO: 11673 - DNA, 23 bp, synthetic construct
  misc_feature 1..23: note = Synthetic construct
  source 1..23: mol_type = other DNA
acacgaacgttttacgaagattc

SEQ ID NO: 11674 - DNA, 23 bp, synthetic construct
  misc_feature 1..23: note = Synthetic construct
  source 1..23: mol_type = other DNA
cacgaacgttttacgaagattcg

SEQ ID NO: 11675 - DNA, 23 bp, synthetic construct
  misc_feature 1..23: note = Synthetic construct
  source 1..23: mol_type = other DNA
acgaacgttttacgaagattcgg

SEQ ID NO: 11676 - DNA, 23 bp, synthetic construct
  misc_feature 1..23: note = Synthetic construct
  source 1..23: mol_type = other DNA
cgaacgttttacgaagattcggt

SEQ ID NO: 11677 - DNA, 23 bp, synthetic construct
  misc_feature 1..23: note = Synthetic construct
  source 1..23: mol_type = other DNA
gaacgttttacgaagattcggtt

SEQ ID NO: 11678 - DNA, 23 bp, synthetic construct
  misc_feature 1..23: note = Synthetic construct
  source 1..23: mol_type = other DNA
aacgttttacgaagattcggttt

SEQ ID NO: 11679 - DNA, 23 bp, synthetic construct
  misc_feature 1..23: note = Synthetic construct
  source 1..23: mol_type = other DNA
acgttttacgaagattcggttta

SEQ ID NO: 11680 - DNA, 23 bp, synthetic construct
  misc_feature 1..23: note = Synthetic construct
  source 1..23: mol_type = other DNA
cgttttacgaagattcggtttaa

SEQ ID NO: 11681 - DNA, 23 bp, synthetic construct
  misc_feature 1..23: note = Synthetic construct
  source 1..23: mol_type = other DNA
gttttacgaagattcggtttaaa

SEQ ID NO: 11682 - DNA, 23 bp, synthetic construct
  misc_feature 1..23: note = Synthetic construct
  source 1..23: mol_type = other DNA
ttttacgaagattcggtttaaaa

SEQ ID NO: 11683 - DNA, 23 bp, synthetic construct
  misc_feature 1..23: note = Synthetic construct
  source 1..23: mol_type = other DNA
tttacgaagattcggtttaaaac

SEQ ID NO: 11684 - DNA, 23 bp, synthetic construct
  misc_feature 1..23: note = Synthetic construct
  source 1..23: mol_type = other DNA
ttacgaagattcggtttaaaacc

SEQ ID NO: 11685 - DNA, 23 bp, synthetic construct
  misc_feature 1..23: note = Synthetic construct
  source 1..23: mol_type = other DNA
tacgaagattcggtttaaaaccg

SEQ ID NO: 11686 - DNA, 23 bp, synthetic construct
  misc_feature 1..23: note = Synthetic construct
  source 1..23: mol_type = other DNA
acgaagattcggtttaaaaccgt

SEQ ID NO: 11687 - DNA, 23 bp, synthetic construct
  misc_feature 1..23: note = Synthetic construct
  source 1..23: mol_type = other DNA
cgaagattcggtttaaaaccgta

SEQ ID NO: 11688 - DNA, 23 bp, synthetic construct
  misc_feature 1..23: note = Synthetic construct
  source 1..23: mol_type = other DNA
gaagattcggtttaaaaccgtag

SEQ ID NO: 11689 - DNA, 23 bp, synthetic construct
  misc_feature 1..23: note = Synthetic construct
  source 1..23: mol_type = other DNA
aagattcggtttaaaaccgtagt

SEQ ID NO: 11690 - DNA, 23 bp, synthetic construct
  misc_feature 1..23: note = Synthetic construct
  source 1..23: mol_type = other DNA
agattcggtttaaaaccgtagta

SEQ ID NO: 11691 - DNA, 23 bp, synthetic construct
  misc_feature 1..23: note = Synthetic construct
  source 1..23: mol_type = other DNA
gattcggtttaaaaccgtagtag

SEQ ID NO: 11692 - DNA, 23 bp, synthetic construct
  misc_feature 1..23: note = Synthetic construct
  source 1..23: mol_type = other DNA
attcggtttaaaaccgtagtagg

SEQ ID NO: 11693 - DNA, 23 bp, synthetic construct
  misc_feature 1..23: note = Synthetic construct
  source 1..23: mol_type = other DNA
ttcggtttaaaaccgtagtaggc

SEQ ID NO: 11694 - DNA, 23 bp, synthetic construct
  misc_feature 1..23: note = Synthetic construct
  source 1..23: mol_type = other DNA
tcggtttaaaaccgtagtaggca

SEQ ID NO: 11695 - DNA, 23 bp, synthetic construct
  misc_feature 1..23: note = Synthetic construct
  source 1..23: mol_type = other DNA
cggtttaaaaccgtagtaggcaa

SEQ ID NO: 11696 - DNA, 23 bp, synthetic construct
  misc_feature 1..23: note = Synthetic construct
  source 1..23: mol_type = other DNA
ggtttaaaaccgtagtaggcaag

SEQ ID NO: 11697 - DNA, 23 bp, synthetic construct
  misc_feature 1..23: note = Synthetic construct
  source 1..23: mol_type = other DNA
gtttaaaaccgtagtaggcaagt

SEQ ID NO: 11698 - DNA, 23 bp, synthetic construct
  misc_feature 1..23: note = Synthetic construct
  source 1..23: mol_type = other DNA
tttaaaaccgtagtaggcaagtg

SEQ ID NO: 11699 - DNA, 23 bp, synthetic construct
  misc_feature 1..23: note = Synthetic construct
  source 1..23: mol_type = other DNA
ttaaaaccgtagtaggcaagtgc

SEQ ID NO: 11700 - DNA, 23 bp, synthetic construct
  misc_feature 1..23: note = Synthetic construct
  source 1..23: mol_type = other DNA
taaaaccgtagtaggcaagtgcc

SEQ ID NO: 11701 - DNA, 23 bp, synthetic construct
  misc_feature 1..23: note = Synthetic construct
  source 1..23: mol_type = other DNA
aaaaccgtagtaggcaagtgcct

SEQ ID NO: 11702 - DNA, 23 bp, synthetic construct
  misc_feature 1..23: note = Synthetic construct
  source 1..23: mol_type = other DNA
aaaccgtagtaggcaagtgcctc

SEQ ID NO: 11703 - DNA, 23 bp, synthetic construct
  misc_feature 1..23: note = Synthetic construct
  source 1..23: mol_type = other DNA
aaccgtagtaggcaagtgcctct

SEQ ID NO: 11704 - DNA, 23 bp, synthetic construct
  misc_feature 1..23: note = Synthetic construct
  source 1..23: mol_type = other DNA
accgtagtaggcaagtgcctcta

SEQ ID NO: 11705 - DNA, 23 bp, synthetic construct
  misc_feature 1..23: note = Synthetic construct
  source 1..23: mol_type = other DNA
ccgtagtaggcaagtgcctctag

SEQ ID NO: 11706 - DNA, 23 bp, synthetic construct
  misc_feature 1..23: note = Synthetic construct
  source 1..23: mol_type = other DNA
cgtagtaggcaagtgcctctagc

SEQ ID NO: 11707 - DNA, 23 bp, synthetic construct
  misc_feature 1..23: note = Synthetic construct
  source 1..23: mol_type = other DNA
gtagtaggcaagtgcctctagca

SEQ ID NO: 11708 - DNA, 23 bp, synthetic construct
  misc_feature 1..23: note = Synthetic construct
  source 1..23: mol_type = other DNA
tagtaggcaagtgcctctagcac

SEQ ID NO: 11709 - DNA, 23 bp, synthetic construct
  misc_feature 1..23: note = Synthetic construct
  source 1..23: mol_type = other DNA
agtaggcaagtgcctctagcaca

SEQ ID NO: 11710 - DNA, 23 bp, synthetic construct
  misc_feature 1..23: note = Synthetic construct
  source 1..23: mol_type = other DNA
gtaggcaagtgcctctagcacac

SEQ ID NO: 11711 - DNA, 23 bp, synthetic construct
  misc_feature 1..23: note = Synthetic construct
  source 1..23: mol_type = other DNA
taggcaagtgcctctagcacacg

SEQ ID NO: 11712 - DNA, 23 bp, synthetic construct
  misc_feature 1..23: note = Synthetic construct
  source 1..23: mol_type = other DNA
aggcaagtgcctctagcacacgg

SEQ ID NO: 11713 - DNA, 23 bp, synthetic construct
  misc_feature 1..23: note = Synthetic construct
  source 1..23: mol_type = other DNA
ggcaagtgcctctagcacacggg

SEQ ID NO: 11714 - DNA, 23 bp, synthetic construct
  misc_feature 1..23: note = Synthetic construct
  source 1..23: mol_type = other DNA
gcaagtgcctctagcacacgggg

SEQ ID NO: 11715 - DNA, 23 bp, synthetic construct
  misc_feature 1..23: note = Synthetic construct
  source 1..23: mol_type = other DNA
caagtgcctctagcacacggggt

SEQ ID NO: 11716 - DNA, 23 bp, synthetic construct
  misc_feature 1..23: note = Synthetic construct
  source 1..23: mol_type = other DNA
aagtgcctctagcacacggggtg

SEQ ID NO: 11717 - DNA, 23 bp, synthetic construct
  misc_feature 1..23: note = Synthetic construct
  source 1..23: mol_type = other DNA
agtgcctctagcacacggggtgc

SEQ ID NO: 11718 - DNA, 23 bp, synthetic construct
  misc_feature 1..23: note = Synthetic construct
  source 1..23: mol_type = other DNA
gtgcctctagcacacggggtgca

SEQ ID NO: 11719 - DNA, 23 bp, synthetic construct
  misc_feature 1..23: note = Synthetic construct
  source 1..23: mol_type = other DNA
tgcctctagcacacggggtgcaa

SEQ ID NO: 11720 - DNA, 23 bp, synthetic construct
  misc_feature 1..23: note = Synthetic construct
  source 1..23: mol_type = other DNA
gcctctagcacacggggtgcaat

SEQ ID NO: 11721 - DNA, 23 bp, synthetic construct
  misc_feature 1..23: note = Synthetic construct
  source 1..23: mol_type = other DNA
cctctagcacacggggtgcaatc

SEQ ID NO: 11722 - DNA, 23 bp, synthetic construct
  misc_feature 1..23: note = Synthetic construct
  source 1..23: mol_type = other DNA
ctctagcacacggggtgcaatct

SEQ ID NO: 11723 - DNA, 23 bp, synthetic construct
  misc_feature 1..23: note = Synthetic construct
  source 1..23: mol_type = other DNA
tctagcacacggggtgcaatctc

SEQ ID NO: 11724 - DNA, 23 bp, synthetic construct
  misc_feature 1..23: note = Synthetic construct
  source 1..23: mol_type = other DNA
ctagcacacggggtgcaatctca

SEQ ID NO: 11725 - DNA, 23 bp, synthetic construct
  misc_feature 1..23: note = Synthetic construct
  source 1..23: mol_type = other DNA
tagcacacggggtgcaatctcac

SEQ ID NO: 11726 - DNA, 23 bp, synthetic construct
  misc_feature 1..23: note = Synthetic construct
  source 1..23: mol_type = other DNA
agcacacggggtgcaatctcact

SEQ ID NO: 11727 - DNA, 23 bp, synthetic construct
  misc_feature 1..23: note = Synthetic construct
  source 1..23: mol_type = other DNA
gcacacggggtgcaatctcactg

SEQ ID NO: 11728 - DNA, 23 bp, synthetic construct
  misc_feature 1..23: note = Synthetic construct
  source 1..23: mol_type = other DNA
cacacggggtgcaatctcactgg

SEQ ID NO: 11729 - DNA, 23 bp, synthetic construct
  misc_feature 1..23: note = Synthetic construct
  source 1..23: mol_type = other DNA
acacggggtgcaatctcactggg

SEQ ID NO: 11730 - DNA, 23 bp, synthetic construct
  misc_feature 1..23: note = Synthetic construct
  source 1..23: mol_type = other DNA
cacggggtgcaatctcactggga

SEQ ID NO: 11731 - DNA, 23 bp, synthetic construct
  misc_feature 1..23: note = Synthetic construct
  source 1..23: mol_type = other DNA
acggggtgcaatctcactgggac

SEQ ID NO: 11732 - DNA, 23 bp, synthetic construct
  misc_feature 1..23: note = Synthetic construct
  source 1..23: mol_type = other DNA
cggggtgcaatctcactgggaca

SEQ ID NO: 11733 - DNA, 23 bp, synthetic construct
  misc_feature 1..23: note = Synthetic construct
  source 1..23: mol_type = other DNA
ggggtgcaatctcactgggacat

SEQ ID NO: 11734 - DNA, 23 bp, synthetic construct
  misc_feature 1..23: note = Synthetic construct
  source 1..23: mol_type = other DNA
gggtgcaatctcactgggacata

SEQ ID NO: 11735 - DNA, 23 bp, synthetic construct
  misc_feature 1..23: note = Synthetic construct
  source 1..23: mol_type = other DNA
ggtgcaatctcactgggacatat

SEQ ID NO: 11736 - DNA, 23 bp, synthetic construct
  misc_feature 1..23: note = Synthetic construct
  source 1..23: mol_type = other DNA
gtgcaatctcactgggacatata

SEQ ID NO: 11737 - DNA, 23 bp, synthetic construct
  misc_feature 1..23: note = Synthetic construct
  source 1..23: mol_type = other DNA
tgcaatctcactgggacatataa

SEQ ID NO: 11738 - DNA, 23 bp, synthetic construct
  misc_feature 1..23: note = Synthetic construct
  source 1..23: mol_type = other DNA
gcaatctcactgggacatataat

SEQ ID NO: 11739 - DNA, 23 bp, synthetic construct
  misc_feature 1..23: note = Synthetic construct
  source 1..23: mol_type = other DNA
caatctcactgggacatataata

SEQ ID NO: 11740 - DNA, 23 bp, synthetic construct
  misc_feature 1..23: note = Synthetic construct
  source 1..23: mol_type = other DNA
aatctcactgggacatataatat

SEQ ID NO: 11741 - DNA, 23 bp, synthetic construct
  misc_feature 1..23: note = Synthetic construct
  source 1..23: mol_type = other DNA
atctcactgggacatataatatc

SEQ ID NO: 11742 - DNA, 23 bp, synthetic construct
  misc_feature 1..23: note = Synthetic construct
  source 1..23: mol_type = other DNA
tctcactgggacatataatatcg

SEQ ID NO: 11743 - DNA, 23 bp, synthetic construct
  misc_feature 1..23: note = Synthetic construct
  source 1..23: mol_type = other DNA
ctcactgggacatataatatcgt

SEQ ID NO: 11744 - DNA, 23 bp, synthetic construct
  misc_feature 1..23: note = Synthetic construct
  source 1..23: mol_type = other DNA
tcactgggacatataatatcgtc

SEQ ID NO: 11745 - DNA, 23 bp, synthetic construct
  misc_feature 1..23: note = Synthetic construct
  source 1..23: mol_type = other DNA
cactgggacatataatatcgtcc

SEQ ID NO: 11746 - DNA, 23 bp, synthetic construct
  misc_feature 1..23: note = Synthetic construct
  source 1..23: mol_type = other DNA
actgggacatataatatcgtccc

SEQ ID NO: 11747 - DNA, 23 bp, synthetic construct
  misc_feature 1..23: note = Synthetic construct
  source 1..23: mol_type = other DNA
ctgggacatataatatcgtcccc

SEQ ID NO: 11748 - DNA, 23 bp, synthetic construct
  misc_feature 1..23: note = Synthetic construct
  source 1..23: mol_type = other DNA
tgggacatataatatcgtccccg

SEQ ID NO: 11749 - DNA, 23 bp, synthetic construct
  misc_feature 1..23: note = Synthetic construct
  source 1..23: mol_type = other DNA
gggacatataatatcgtccccgt

SEQ ID NO: 11750 - DNA, 23 bp, synthetic construct
  misc_feature 1..23: note = Synthetic construct
  source 1..23: mol_type = other DNA
ggacatataatatcgtccccgta

SEQ ID NO: 11751 - DNA, 23 bp, synthetic construct
  misc_feature 1..23: note = Synthetic construct
  source 1..23: mol_type = other DNA
gacatataatatcgtccccgtag

SEQ ID NO: 11752 - DNA, 23 bp, synthetic construct
  misc_feature 1..23: note = Synthetic construct
  source 1..23: mol_type = other DNA
acatataatatcgtccccgtaga

SEQ ID NO: 11753 - DNA, 23 bp, synthetic construct
  misc_feature 1..23: note = Synthetic construct
  source 1..23: mol_type = other DNA
catataatatcgtccccgtagat

SEQ ID NO: 11754 - DNA, 23 bp, synthetic construct
  misc_feature 1..23: note = Synthetic construct
  source 1..23: mol_type = other DNA
atataatatcgtccccgtagatg

SEQ ID NO: 11755 - DNA, 23 bp, synthetic construct
  misc_feature 1..23: note = Synthetic construct
  source 1..23: mol_type = other DNA
tataatatcgtccccgtagatgc

SEQ ID NO: 11756 - DNA, 23 bp, synthetic construct
  misc_feature 1..23: note = Synthetic construct
  source 1..23: mol_type = other DNA
ataatatcgtccccgtagatgcc

SEQ ID NO: 11757 - DNA, 23 bp, synthetic construct
  misc_feature 1..23: note = Synthetic construct
  source 1..23: mol_type = other DNA
taatatcgtccccgtagatgcct

SEQ ID NO: 11758 - DNA, 23 bp, synthetic construct
  misc_feature 1..23: note = Synthetic construct
  source 1..23: mol_type = other DNA
aatatcgtccccgtagatgccta

SEQ ID NO: 11759 - DNA, 23 bp, synthetic construct
  misc_feature 1..23: note = Synthetic construct
  source 1..23: mol_type = other DNA
atatcgtccccgtagatgcctat

SEQ ID NO: 11760 - DNA, 23 bp, synthetic construct
  misc_feature 1..23: note = Synthetic construct
  source 1..23: mol_type = other DNA
tatcgtccccgtagatgcctatg

SEQ ID NO: 11761 - DNA, 23 bp, synthetic construct
  misc_feature 1..23: note = Synthetic construct
  source 1..23: mol_type = other DNA
atcgtccccgtagatgcctatgg

SEQ ID NO: 11762 - DNA, 23 bp, synthetic construct
  misc_feature 1..23: note = Synthetic construct
  source 1..23: mol_type = other DNA
tcgtccccgtagatgcctatggt

SEQ ID NO: 11763 - DNA, 23 bp, synthetic construct
  misc_feature 1..23: note = Synthetic construct
  source 1..23: mol_type = other DNA
cgtccccgtagatgcctatggtt

SEQ ID NO: 11764 - DNA, 23 bp, synthetic construct
  misc_feature 1..23: note = Synthetic construct
  source 1..23: mol_type = other DNA
gtccccgtagatgcctatggttc

SEQ ID NO: 11765 - DNA, 23 bp, synthetic construct
  misc_feature 1..23: note = Synthetic construct
  source 1..23: mol_type = other DNA
tccccgtagatgcctatggttcc

SEQ ID NO: 11766 - DNA, 23 bp, synthetic construct
  misc_feature 1..23: note = Synthetic construct
  source 1..23: mol_type = other DNA
ccccgtagatgcctatggttccg

SEQ ID NO: 11767 - DNA, 23 bp, synthetic construct
  misc_feature 1..23: note = Synthetic construct
  source 1..23: mol_type = other DNA
cccgtagatgcctatggttccgg

SEQ ID NO: 11768 - DNA, 23 bp, synthetic construct
  misc_feature 1..23: note = Synthetic construct
  source 1..23: mol_type = other DNA
ccgtagatgcctatggttccggc

SEQ ID NO: 11769 - DNA, 23 bp, synthetic construct
  misc_feature 1..23: note = Synthetic construct
  source 1..23: mol_type = other DNA
cgtagatgcctatggttccggcg

SEQ ID NO: 11770 - DNA, 23 bp, synthetic construct
  misc_feature 1..23: note = Synthetic construct
  source 1..23: mol_type = other DNA
gtagatgcctatggttccggcgt

SEQ ID NO: 11771 - DNA, 23 bp, synthetic construct
  misc_feature 1..23: note = Synthetic construct
  source 1..23: mol_type = other DNA
tagatgcctatggttccggcgtt

SEQ ID NO: 11772 - DNA, 23 bp, synthetic construct
  misc_feature 1..23: note = Synthetic construct
  source 1..23: mol_type = other DNA
agatgcctatggttccggcgtta

SEQ ID NO: 11773 - DNA, 23 bp, synthetic construct
  misc_feature 1..23: note = Synthetic construct
  source 1..23: mol_type = other DNA
gatgcctatggttccggcgttac

SEQ ID NO: 11774 - DNA, 23 bp, synthetic construct
  misc_feature 1..23: note = Synthetic construct
  source 1..23: mol_type = other DNA
atgcctatggttccggcgttacc

SEQ ID NO: 11775 - DNA, 23 bp, synthetic construct
  misc_feature 1..23: note = Synthetic construct
  source 1..23: mol_type = other DNA
tgcctatggttccggcgttacca

SEQ ID NO: 11776 - DNA, 23 bp, synthetic construct
  misc_feature 1..23: note = Synthetic construct
  source 1..23: mol_type = other DNA
gcctatggttccggcgttaccaa

SEQ ID NO: 11777 - DNA, 23 bp, synthetic construct
  misc_feature 1..23: note = Synthetic construct
  source 1..23: mol_type = other DNA
cctatggttccggcgttaccaaa

SEQ ID NO: 11778 - DNA, 23 bp, synthetic construct
  misc_feature 1..23: note = Synthetic construct
  source 1..23: mol_type = other DNA
ctatggttccggcgttaccaaaa

SEQ ID NO: 11779 - DNA, 23 bp, synthetic construct
  misc_feature 1..23: note = Synthetic construct
  source 1..23: mol_type = other DNA
tatggttccggcgttaccaaaat

SEQ ID NO: 11780 - DNA, 23 bp, synthetic construct
  misc_feature 1..23: note = Synthetic construct
  source 1..23: mol_type = other DNA
atggttccggcgttaccaaaatg

SEQ ID NO: 11781 - DNA, 23 bp, synthetic construct
  misc_feature 1..23: note = Synthetic construct
  source 1..23: mol_type = other DNA
tggttccggcgttaccaaaatgg

SEQ ID NO: 11782 - DNA, 23 bp, synthetic construct
  misc_feature 1..23: note = Synthetic construct
  source 1..23: mol_type = other DNA
ggttccggcgttaccaaaatgga

SEQ ID NO: 11783 - DNA, 23 bp, synthetic construct
  misc_feature 1..23: note = Synthetic construct
  source 1..23: mol_type = other DNA
gttccggcgttaccaaaatggat

SEQ ID NO: 11784 - DNA, 23 bp, synthetic construct
  misc_feature 1..23: note = Synthetic construct
  source 1..23: mol_type = other DNA
ttccggcgttaccaaaatggatt

SEQ ID NO: 11785 - DNA, 23 bp, synthetic construct
  misc_feature 1..23: note = Synthetic construct
  source 1..23: mol_type = other DNA
tccggcgttaccaaaatggattt

SEQ ID NO: 11786 - DNA, 23 bp, synthetic construct
  misc_feature 1..23: note = Synthetic construct
  source 1..23: mol_type = other DNA
ccggcgttaccaaaatggatttg

SEQ ID NO: 11787 - DNA, 23 bp, synthetic construct
  misc_feature 1..23: note = Synthetic construct
  source 1..23: mol_type = other DNA
cggcgttaccaaaatggatttgg

SEQ ID NO: 11788 - DNA, 23 bp, synthetic construct
  misc_feature 1..23: note = Synthetic construct
  source 1..23: mol_type = other DNA
ggcgttaccaaaatggatttggg

SEQ ID NO: 11789 - DNA, 23 bp, synthetic construct
  misc_feature 1..23: note = Synthetic construct
  source 1..23: mol_type = other DNA
gcgttaccaaaatggatttgggt

SEQ ID NO: 11790 - DNA, 23 bp, synthetic construct
  misc_feature 1..23: note = Synthetic construct
  source 1..23: mol_type = other DNA
cgttaccaaaatggatttgggtc

SEQ ID NO: 11791 - DNA, 23 bp, synthetic construct
  misc_feature 1..23: note = Synthetic construct
  source 1..23: mol_type = other DNA
gttaccaaaatggatttgggtcg

SEQ ID NO: 11792 - DNA, 23 bp, synthetic construct
  misc_feature 1..23: note = Synthetic construct
  source 1..23: mol_type = other DNA
ttaccaaaatggatttgggtcgc

SEQ ID NO: 11793 - DNA, 23 bp, synthetic construct
  misc_feature 1..23: note = Synthetic construct
  source 1..23: mol_type = other DNA
taccaaaatggatttgggtcgct

SEQ ID NO: 11794 - DNA, 23 bp, synthetic construct
  misc_feature 1..23: note = Synthetic construct
  source 1..23: mol_type = other DNA
accaaaatggatttgggtcgctt

SEQ ID NO: 11795 - DNA, 23 bp, synthetic construct
  misc_feature 1..23: note = Synthetic construct
  source 1..23: mol_type = other DNA
ccaaaatggatttgggtcgcttt

SEQ ID NO: 11796 - DNA, 23 bp, synthetic construct
  misc_feature 1..23: note = Synthetic construct
  source 1..23: mol_type = other DNA
caaaatggatttgggtcgctttg

SEQ ID NO: 11797 - DNA, 23 bp, synthetic construct
  misc_feature 1..23: note = Synthetic construct
  source 1..23: mol_type = other DNA
aaaatggatttgggtcgctttga

SEQ ID NO: 11798 - DNA, 23 bp, synthetic construct
  misc_feature 1..23: note = Synthetic construct
  source 1..23: mol_type = other DNA
aaatggatttgggtcgctttgac

SEQ ID NO: 11799 - DNA, 23 bp, synthetic construct
  misc_feature 1..23: note = Synthetic construct
  source 1..23: mol_type = other DNA
aatggatttgggtcgctttgact

SEQ ID NO: 11800 - DNA, 23 bp, synthetic construct
  misc_feature 1..23: note = Synthetic construct
  source 1..23: mol_type = other DNA
atggatttgggtcgctttgacta

SEQ ID NO: 11801 - DNA, 23 bp, synthetic construct
  misc_feature 1..23: note = Synthetic construct
  source 1..23: mol_type = other DNA
tggatttgggtcgctttgactat

SEQ ID NO: 11802 - DNA, 23 bp, synthetic construct
  misc_feature 1..23: note = Synthetic construct
  source 1..23: mol_type = other DNA
ggatttgggtcgctttgactatt

SEQ ID NO: 11803 - DNA, 23 bp, synthetic construct
  misc_feature 1..23: note = Synthetic construct
  source 1..23: mol_type = other DNA
gatttgggtcgctttgactattg

SEQ ID NO: 11804 - DNA, 23 bp, synthetic construct
  misc_feature 1..23: note = Synthetic construct
  source 1..23: mol_type = other DNA
atttgggtcgctttgactattgc

SEQ ID NO: 11805 - DNA, 23 bp, synthetic construct
  misc_feature 1..23: note = Synthetic construct
  source 1..23: mol_type = other DNA
tttgggtcgctttgactattgcc

SEQ ID NO: 11806 - DNA, 23 bp, synthetic construct
  misc_feature 1..23: note = Synthetic construct
  source 1..23: mol_type = other DNA
ttgggtcgctttgactattgccc

SEQ ID NO: 11807 - DNA, 23 bp, synthetic construct
  misc_feature 1..23: note = Synthetic construct
  source 1..23: mol_type = other DNA
tgggtcgctttgactattgccca

SEQ ID NO: 11808 - DNA, 23 bp, synthetic construct
  misc_feature 1..23: note = Synthetic construct
  source 1..23: mol_type = other DNA
gggtcgctttgactattgcccag

SEQ ID NO: 11809 - DNA, 23 bp, synthetic construct
  misc_feature 1..23: note = Synthetic construct
  source 1..23: mol_type = other DNA
ggtcgctttgactattgcccaga

SEQ ID NO: 11810 - DNA, 23 bp, synthetic construct
  misc_feature 1..23: note = Synthetic construct
  source 1..23: mol_type = other DNA
gtcgctttgactattgcccagaa

SEQ ID NO: 11811 - DNA, 23 bp, synthetic construct
  misc_feature 1..23: note = Synthetic construct
  source 1..23: mol_type = other DNA
tcgctttgactattgcccagaat

SEQ ID NO: 11812 - DNA, 23 bp, synthetic construct
  misc_feature 1..23: note = Synthetic construct
  source 1..23: mol_type = other DNA
cgctttgactattgcccagaata

SEQ ID NO: 11813 - DNA, 23 bp, synthetic construct
  misc_feature 1..23: note = Synthetic construct
  source 1..23: mol_type = other DNA
gctttgactattgcccagaatat

SEQ ID NO: 11814 - DNA, 23 bp, synthetic construct
  misc_feature 1..23: note = Synthetic construct
  source 1..23: mol_type = other DNA
ctttgactattgcccagaatatc

SEQ ID NO: 11815 - DNA, 23 bp, synthetic construct
  misc_feature 1..23: note = Synthetic construct
  source 1..23: mol_type = other DNA
tttgactattgcccagaatatca

SEQ ID NO: 11816 - DNA, 23 bp, synthetic construct
  misc_feature 1..23: note = Synthetic construct
  source 1..23: mol_type = other DNA
ttgactattgcccagaatatcat

SEQ ID NO: 11817 - DNA, 23 bp, synthetic construct
  misc_feature 1..23: note = Synthetic construct
  source 1..23: mol_type = other DNA
tgactattgcccagaatatcatg

SEQ ID NO: 11818 - DNA, 23 bp, synthetic construct
  misc_feature 1..23: note = Synthetic construct
  source 1..23: mol_type = other DNA
gactattgcccagaatatcatgg

SEQ ID NO: 11819 - DNA, 23 bp, synthetic construct
  misc_feature 1..23: note = Synthetic construct
  source 1..23: mol_type = other DNA
actattgcccagaatatcatgga

SEQ ID NO: 11820 - DNA, 23 bp, synthetic construct
  misc_feature 1..23: note = Synthetic construct
  source 1..23: mol_type = other DNA
ctattgcccagaatatcatggac

SEQ ID NO: 11821 - DNA, 23 bp, synthetic construct
  misc_feature 1..23: note = Synthetic construct
  source 1..23: mol_type = other DNA
tattgcccagaatatcatggact

SEQ ID NO: 11822 - DNA, 23 bp, synthetic construct
  misc_feature 1..23: note = Synthetic construct
  source 1..23: mol_type = other DNA
attgcccagaatatcatggactc

SEQ ID NO: 11823 - DNA, 23 bp, synthetic construct
  misc_feature 1..23: note = Synthetic construct
  source 1..23: mol_type = other DNA
ttgcccagaatatcatggactct

SEQ ID NO: 11824 - DNA, 23 bp, synthetic construct
  misc_feature 1..23: note = Synthetic construct
  source 1..23: mol_type = other DNA
tgcccagaatatcatggactcta

SEQ ID NO: 11825 - DNA, 23 bp, synthetic construct
  misc_feature 1..23: note = Synthetic construct
  source 1..23: mol_type = other DNA
gcccagaatatcatggactctag

SEQ ID NO: 11826 - DNA, 23 bp, synthetic construct
  misc_feature 1..23: note = Synthetic construct
  source 1..23: mol_type = other DNA
cccagaatatcatggactctagc

SEQ ID NO: 11827 - DNA, 23 bp, synthetic construct
  misc_feature 1..23: note = Synthetic construct
  source 1..23: mol_type = other DNA
ccagaatatcatggactctagct

SEQ ID NO: 11828 - DNA, 23 bp, synthetic construct
  misc_feature 1..23: note = Synthetic construct
  source 1..23: mol_type = other DNA
cagaatatcatggactctagctc

SEQ ID NO: 11829 - DNA, 23 bp, synthetic construct
  misc_feature 1..23: note = Synthetic construct
  source 1..23: mol_type = other DNA
agaatatcatggactctagctca

SEQ ID NO: 11830 - DNA, 23 bp, synthetic construct
  misc_feature 1..23: note = Synthetic construct
  source 1..23: mol_type = other DNA
gaatatcatggactctagctcaa

SEQ ID NO: 11831 - DNA, 23 bp, synthetic construct
  misc_feature 1..23: note = Synthetic construct
  source 1..23: mol_type = other DNA
aatatcatggactctagctcaaa

SEQ ID NO: 11832 - DNA, 23 bp, synthetic construct
  misc_feature 1..23: note = Synthetic construct
  source 1..23: mol_type = other DNA
atatcatggactctagctcaaat

SEQ ID NO: 11833 - DNA, 23 bp, synthetic construct
  misc_feature 1..23: note = Synthetic construct
  source 1..23: mol_type = other DNA
tatcatggactctagctcaaatg

SEQ ID NO: 11834 - DNA, 23 bp, synthetic construct
  misc_feature 1..23: note = Synthetic construct
  source 1..23: mol_type = other DNA
atcatggactctagctcaaatgt

SEQ ID NO: 11835 - DNA, 23 bp, synthetic construct
  misc_feature 1..23: note = Synthetic construct
  source 1..23: mol_type = other DNA
tcatggactctagctcaaatgtg

SEQ ID NO: 11836 - DNA, 23 bp, synthetic construct
  misc_feature 1..23: note = Synthetic construct
  source 1..23: mol_type = other DNA
catggactctagctcaaatgtga

SEQ ID NO: 11837 - DNA, 23 bp, synthetic construct
  misc_feature 1..23: note = Synthetic construct
  source 1..23: mol_type = other DNA
atggactctagctcaaatgtgaa

SEQ ID NO: 11838 - DNA, 23 bp, synthetic construct
  misc_feature 1..23: note = Synthetic construct
  source 1..23: mol_type = other DNA
tggactctagctcaaatgtgaac

SEQ ID NO: 11839 - DNA, 23 bp, synthetic construct
  misc_feature 1..23: note = Synthetic construct
  source 1..23: mol_type = other DNA
ggactctagctcaaatgtgaacc

SEQ ID NO: 11840 - DNA, 23 bp, synthetic construct
  misc_feature 1..23: note = Synthetic construct
  source 1..23: mol_type = other DNA
gactctagctcaaatgtgaaccc

SEQ ID NO: 11841 - DNA, 23 bp, synthetic construct
  misc_feature 1..23: note = Synthetic construct
  source 1..23: mol_type = other DNA
actctagctcaaatgtgaaccca

SEQ ID NO: 11842 - DNA, 23 bp, synthetic construct
  misc_feature 1..23: note = Synthetic construct
  source 1..23: mol_type = other DNA
ctctagctcaaatgtgaacccat

SEQ ID NO: 11843 - DNA, 23 bp, synthetic construct
  misc_feature 1..23: note = Synthetic construct
  source 1..23: mol_type = other DNA
tctagctcaaatgtgaacccatt

SEQ ID NO: 11844 - DNA, 23 bp, synthetic construct
  misc_feature 1..23: note = Synthetic construct
  source 1..23: mol_type = other DNA
ctagctcaaatgtgaacccattt

SEQ ID NO: 11845 - DNA, 23 bp, synthetic construct
  misc_feature 1..23: note = Synthetic construct
  source 1..23: mol_type = other DNA
tagctcaaatgtgaacccatttc

SEQ ID NO: 11846 - DNA, 23 bp, synthetic construct
  misc_feature 1..23: note = Synthetic construct
  source 1..23: mol_type = other DNA
agctcaaatgtgaacccatttcc

SEQ ID NO: 11847 - DNA, 23 bp, synthetic construct
  misc_feature 1..23: note = Synthetic construct
  source 1..23: mol_type = other DNA
gctcaaatgtgaacccatttccc

SEQ ID NO: 11848 - DNA, 23 bp, synthetic construct
  misc_feature 1..23: note = Synthetic construct
  source 1..23: mol_type = other DNA
ctcaaatgtgaacccatttccca

SEQ ID NO: 11849 - DNA, 23 bp, synthetic construct
  misc_feature 1..23: note = Synthetic construct
  source 1..23: mol_type = other DNA
tcaaatgtgaacccatttcccat

SEQ ID NO: 11850 - DNA, 23 bp, synthetic construct
  misc_feature 1..23: note = Synthetic construct
  source 1..23: mol_type = other DNA
caaatgtgaacccatttcccatt

SEQ ID NO: 11851 - DNA, 23 bp, synthetic construct
  misc_feature 1..23: note = Synthetic construct
  source 1..23: mol_type = other DNA
aaatgtgaacccatttcccattg

SEQ ID NO: 11852 - DNA, 23 bp, synthetic construct
  misc_feature 1..23: note = Synthetic construct
  source 1..23: mol_type = other DNA
aatgtgaacccatttcccattgt

SEQ ID NO: 11853 - DNA, 23 bp, synthetic construct
  misc_feature 1..23: note = Synthetic construct
  source 1..23: mol_type = other DNA
atgtgaacccatttcccattgtg

SEQ ID NO: 11854 - DNA, 23 bp, synthetic construct
  misc_feature 1..23: note = Synthetic construct
  source 1..23: mol_type = other DNA
tgtgaacccatttcccattgtgg

SEQ ID NO: 11855 - DNA, 23 bp, synthetic construct
  misc_feature 1..23: note = Synthetic construct
  source 1..23: mol_type = other DNA
gtgaacccatttcccattgtgga

SEQ ID NO: 11856 - DNA, 23 bp, synthetic construct
  misc_feature 1..23: note = Synthetic construct
  source 1..23: mol_type = other DNA
tgaacccatttcccattgtggaa

SEQ ID NO: 11857 - DNA, 23 bp, synthetic construct
  misc_feature 1..23: note = Synthetic construct
  source 1..23: mol_type = other DNA
gaacccatttcccattgtggaaa

SEQ ID NO: 11858 - DNA, 23 bp, synthetic construct
  misc_feature 1..23: note = Synthetic construct
  source 1..23: mol_type = other DNA
aacccatttcccattgtggaaaa

SEQ ID NO: 11859 - DNA, 23 bp, synthetic construct
  misc_feature 1..23: note = Synthetic construct
  source 1..23: mol_type = other DNA
acccatttcccattgtggaaaat

SEQ ID NO: 11860 - DNA, 23 bp, synthetic construct
  misc_feature 1..23: note = Synthetic construct
  source 1..23: mol_type = other DNA
cccatttcccattgtggaaaata

SEQ ID NO: 11861 - DNA, 23 bp, synthetic construct
  misc_feature 1..23: note = Synthetic construct
  source 1..23: mol_type = other DNA
ccatttcccattgtggaaaatag

SEQ ID NO: 11862 - DNA, 23 bp, synthetic construct
  misc_feature 1..23: note = Synthetic construct
  source 1..23: mol_type = other DNA
catttcccattgtggaaaatagt

SEQ ID NO: 11863 - DNA, 23 bp, synthetic construct
  misc_feature 1..23: note = Synthetic construct
  source 1..23: mol_type = other DNA
atttcccattgtggaaaatagtt

SEQ ID NO: 11864 - DNA, 23 bp, synthetic construct
  misc_feature 1..23: note = Synthetic construct
  source 1..23: mol_type = other DNA
tttcccattgtggaaaatagttc

SEQ ID NO: 11865 - DNA, 23 bp, synthetic construct
  misc_feature 1..23: note = Synthetic construct
  source 1..23: mol_type = other DNA
ttcccattgtggaaaatagttcc

SEQ ID NO: 11866 - DNA, 23 bp, synthetic construct
  misc_feature 1..23: note = Synthetic construct
  source 1..23: mol_type = other DNA
tcccattgtggaaaatagttccc

SEQ ID NO: 11867 - DNA, 23 bp, synthetic construct
  misc_feature 1..23: note = Synthetic construct
  source 1..23: mol_type = other DNA
cccattgtggaaaatagttccca

SEQ ID NO: 11868 - DNA, 23 bp, synthetic construct
  misc_feature 1..23: note = Synthetic construct
  source 1..23: mol_type = other DNA
ccattgtggaaaatagttcccat

SEQ ID NO: 11869 - DNA, 23 bp, synthetic construct
  misc_feature 1..23: note = Synthetic construct
  source 1..23: mol_type = other DNA
cattgtggaaaatagttcccatc

SEQ ID NO: 11870 - DNA, 23 bp, synthetic construct
  misc_feature 1..23: note = Synthetic construct
  source 1..23: mol_type = other DNA
attgtggaaaatagttcccatcg

SEQ ID NO: 11871 - DNA, 23 bp, synthetic construct
  misc_feature 1..23: note = Synthetic construct
  source 1..23: mol_type = other DNA
ttgtggaaaatagttcccatcgt

SEQ ID NO: 11872 - DNA, 23 bp, synthetic construct
  misc_feature 1..23: note = Synthetic construct
  source 1..23: mol_type = other DNA
tgtggaaaatagttcccatcgta

SEQ ID NO: 11873 - DNA, 23 bp, synthetic construct
  misc_feature 1..23: note = Synthetic construct
  source 1..23: mol_type = other DNA
gtggaaaatagttcccatcgtat

SEQ ID NO: 11874 - DNA, 23 bp, synthetic construct
  misc_feature 1..23: note = Synthetic construct
  source 1..23: mol_type = other DNA
tggaaaatagttcccatcgtatc

SEQ ID NO: 11875 - DNA, 23 bp, synthetic construct
  misc_feature 1..23: note = Synthetic construct
  source 1..23: mol_type = other DNA
ggaaaatagttcccatcgtatcg

SEQ ID NO: 11876 - DNA, 23 bp, synthetic construct
  misc_feature 1..23: note = Synthetic construct
  source 1..23: mol_type = other DNA
gaaaatagttcccatcgtatcgt

SEQ ID NO: 11877 - DNA, 23 bp, synthetic construct
  misc_feature 1..23: note = Synthetic construct
  source 1..23: mol_type = other DNA
aaaatagttcccatcgtatcgtc

SEQ ID NO: 11878 - DNA, 23 bp, synthetic construct
  misc_feature 1..23: note = Synthetic construct
  source 1..23: mol_type = other DNA
aaatagttcccatcgtatcgtct

SEQ ID NO: 11879 - DNA, 23 bp, synthetic construct
  misc_feature 1..23: note = Synthetic construct
  source 1..23: mol_type = other DNA
aatagttcccatcgtatcgtctc

SEQ ID NO: 11880 - DNA, 23 bp, synthetic construct
  misc_feature 1..23: note = Synthetic construct
  source 1..23: mol_type = other DNA
atagttcccatcgtatcgtctcg

SEQ ID NO: 11881 - DNA, 23 bp, synthetic construct
  misc_feature 1..23: note = Synthetic construct
  source 1..23: mol_type = other DNA
tagttcccatcgtatcgtctcgc

SEQ ID NO: 11882 - DNA, 23 bp, synthetic construct
  misc_feature 1..23: note = Synthetic construct
  source 1..23: mol_type = other DNA
agttcccatcgtatcgtctcgcc

SEQ ID NO: 11883 - DNA, 23 bp, synthetic construct
  misc_feature 1..23: note = Synthetic construct
  source 1..23: mol_type = other DNA
gttcccatcgtatcgtctcgcca

SEQ ID NO: 11884 - DNA, 23 bp, synthetic construct
  misc_feature 1..23: note = Synthetic construct
  source 1..23: mol_type = other DNA
ttcccatcgtatcgtctcgccat

SEQ ID NO: 11885 - DNA, 23 bp, synthetic construct
  misc_feature 1..23: note = Synthetic construct
  source 1..23: mol_type = other DNA
tcccatcgtatcgtctcgccatc

SEQ ID NO: 11886 - DNA, 23 bp, synthetic construct
  misc_feature 1..23: note = Synthetic construct
  source 1..23: mol_type = other DNA
cccatcgtatcgtctcgccatct

SEQ ID NO: 11887 - DNA, 23 bp, synthetic construct
  misc_feature 1..23: note = Synthetic construct
  source 1..23: mol_type = other DNA
ccatcgtatcgtctcgccatcta

SEQ ID NO: 11888 - DNA, 23 bp, synthetic construct
  misc_feature 1..23: note = Synthetic construct
  source 1..23: mol_type = other DNA
catcgtatcgtctcgccatctac

SEQ ID NO: 11889 - DNA, 23 bp, synthetic construct
  misc_feature 1..23: note = Synthetic construct
  source 1..23: mol_type = other DNA
atcgtatcgtctcgccatctacg

SEQ ID NO: 11890 - DNA, 23 bp, synthetic construct
  misc_feature 1..23: note = Synthetic construct
  source 1..23: mol_type = other DNA
tcgtatcgtctcgccatctacga

SEQ ID NO: 11891 - DNA, 23 bp, synthetic construct
  misc_feature 1..23: note = Synthetic construct
  source 1..23: mol_type = other DNA
cgtatcgtctcgccatctacgat

SEQ ID NO: 11892 - DNA, 23 bp, synthetic construct
  misc_feature 1..23: note = Synthetic construct
  source 1..23: mol_type = other DNA
gtatcgtctcgccatctacgatt

SEQ ID NO: 11893 - DNA, 23 bp, synthetic construct
  misc_feature 1..23: note = Synthetic construct
  source 1..23: mol_type = other DNA
tatcgtctcgccatctacgattc

SEQ ID NO: 11894 - DNA, 23 bp, synthetic construct
  misc_feature 1..23: note = Synthetic construct
  source 1..23: mol_type = other DNA
atcgtctcgccatctacgattcc

SEQ ID NO: 11895 - DNA, 23 bp, synthetic construct
  misc_feature 1..23: note = Synthetic construct
  source 1..23: mol_type = other DNA
tcgtctcgccatctacgattccg

SEQ ID NO: 11896 - DNA, 23 bp, synthetic construct
  misc_feature 1..23: note = Synthetic construct
  source 1..23: mol_type = other DNA
cgtctcgccatctacgattccgt

SEQ ID NO: 11897 - DNA, 23 bp, synthetic construct
  misc_feature 1..23: note = Synthetic construct
  source 1..23: mol_type = other DNA
gtctcgccatctacgattccgta

SEQ ID NO: 11898 - DNA, 23 bp, synthetic construct
  misc_feature 1..23: note = Synthetic construct
  source 1..23: mol_type = other DNA
tctcgccatctacgattccgtag

SEQ ID NO: 11899 - DNA, 23 bp, synthetic construct
  misc_feature 1..23: note = Synthetic construct
  source 1..23: mol_type = other DNA
ctcgccatctacgattccgtagt

SEQ ID NO: 11900 - DNA, 23 bp, synthetic construct
  misc_feature 1..23: note = Synthetic construct
  source 1..23: mol_type = other DNA
tcgccatctacgattccgtagtg

SEQ ID NO: 11901 - DNA, 23 bp, synthetic construct
  misc_feature 1..23: note = Synthetic construct
  source 1..23: mol_type = other DNA
cgccatctacgattccgtagtgt

SEQ ID NO: 11902 - DNA, 23 bp, synthetic construct
  misc_feature 1..23: note = Synthetic construct
  source 1..23: mol_type = other DNA
gccatctacgattccgtagtgtg

SEQ ID NO: 11903 - DNA, 23 bp, synthetic construct
  misc_feature 1..23: note = Synthetic construct
  source 1..23: mol_type = other DNA
ccatctacgattccgtagtgtga

SEQ ID NO: 11904 - DNA, 23 bp, synthetic construct
  misc_feature 1..23: note = Synthetic construct
  source 1..23: mol_type = other DNA
catctacgattccgtagtgtgag

SEQ ID NO: 11905 - DNA, 23 bp, synthetic construct
  misc_feature 1..23: note = Synthetic construct
  source 1..23: mol_type = other DNA
atctacgattccgtagtgtgagc

SEQ ID NO: 11906 - DNA, 23 bp, synthetic construct
  misc_feature 1..23: note = Synthetic construct
  source 1..23: mol_type = other DNA
tctacgattccgtagtgtgagcg

SEQ ID NO: 11907 - DNA, 23 bp, synthetic construct
  misc_feature 1..23: note = Synthetic construct
  source 1..23: mol_type = other DNA
ctacgattccgtagtgtgagcgg

SEQ ID NO: 11908 - DNA, 23 bp, synthetic construct
  misc_feature 1..23: note = Synthetic construct
  source 1..23: mol_type = other DNA
tacgattccgtagtgtgagcgga

SEQ ID NO: 11909 - DNA, 23 bp, synthetic construct
  misc_feature 1..23: note = Synthetic construct
  source 1..23: mol_type = other DNA
acgattccgtagtgtgagcggat

SEQ ID NO: 11910 - DNA, 23 bp, synthetic construct
  misc_feature 1..23: note = Synthetic construct
  source 1..23: mol_type = other DNA
cgattccgtagtgtgagcggata

SEQ ID NO: 11911 - DNA, 23 bp, synthetic construct
  misc_feature 1..23: note = Synthetic construct
  source 1..23: mol_type = other DNA
gattccgtagtgtgagcggatac

SEQ ID NO: 11912 - DNA, 23 bp, synthetic construct
  misc_feature 1..23: note = Synthetic construct
  source 1..23: mol_type = other DNA
attccgtagtgtgagcggatacg

SEQ ID NO: 11913 - DNA, 23 bp, synthetic construct
  misc_feature 1..23: note = Synthetic construct
  source 1..23: mol_type = other DNA
ttccgtagtgtgagcggatacga

SEQ ID NO: 11914 - DNA, 23 bp, synthetic construct
  misc_feature 1..23: note = Synthetic construct
  source 1..23: mol_type = other DNA
tccgtagtgtgagcggatacgat

SEQ ID NO: 11915 - DNA, 23 bp, synthetic construct
  misc_feature 1..23: note = Synthetic construct
  source 1..23: mol_type = other DNA
ccgtagtgtgagcggatacgatc

SEQ ID NO: 11916 - DNA, 23 bp, synthetic construct
  misc_feature 1..23: note = Synthetic construct
  source 1..23: mol_type = other DNA
cgtagtgtgagcggatacgatcg

SEQ ID NO: 11917 - DNA, 23 bp, synthetic construct
  misc_feature 1..23: note = Synthetic construct
  source 1..23: mol_type = other DNA
gtagtgtgagcggatacgatcga

SEQ ID NO: 11918 - DNA, 23 bp, synthetic construct
  misc_feature 1..23: note = Synthetic construct
  source 1..23: mol_type = other DNA
tagtgtgagcggatacgatcgag

SEQ ID NO: 11919 - DNA, 23 bp, synthetic construct
  misc_feature 1..23: note = Synthetic construct
  source 1..23: mol_type = other DNA
agtgtgagcggatacgatcgaga

SEQ ID NO: 11920 - DNA, 23 bp, synthetic construct
  misc_feature 1..23: note = Synthetic construct
  source 1..23: mol_type = other DNA
gtgtgagcggatacgatcgagat

SEQ ID NO: 11921 - DNA, 23 bp, synthetic construct
  misc_feature 1..23: note = Synthetic construct
  source 1..23: mol_type = other DNA
tgtgagcggatacgatcgagata

SEQ ID NO: 11922 - DNA, 23 bp, synthetic construct
  misc_feature 1..23: note = Synthetic construct
  source 1..23: mol_type = other DNA
gtgagcggatacgatcgagatat

SEQ ID NO: 11923 - DNA, 23 bp, synthetic construct
  misc_feature 1..23: note = Synthetic construct
  source 1..23: mol_type = other DNA
tgagcggatacgatcgagatatg

SEQ ID NO: 11924 - DNA, 23 bp, synthetic construct
  misc_feature 1..23: note = Synthetic construct
  source 1..23: mol_type = other DNA
gagcggatacgatcgagatatga

SEQ ID NO: 11925 - DNA, 23 bp, synthetic construct
  misc_feature 1..23: note = Synthetic construct
  source 1..23: mol_type = other DNA
agcggatacgatcgagatatgaa

SEQ ID NO: 11926 - DNA, 23 bp, synthetic construct
  misc_feature 1..23: note = Synthetic construct
  source 1..23: mol_type = other DNA
gcggatacgatcgagatatgaat

SEQ ID NO: 11927 - DNA, 23 bp, synthetic construct
  misc_feature 1..23: note = Synthetic construct
  source 1..23: mol_type = other DNA
cggatacgatcgagatatgaata

SEQ ID NO: 11928 - DNA, 23 bp, synthetic construct
  misc_feature 1..23: note = Synthetic construct
  source 1..23: mol_type = other DNA
ggatacgatcgagatatgaatat

SEQ ID NO: 11929 - DNA, 23 bp, synthetic construct
  misc_feature 1..23: note = Synthetic construct
  source 1..23: mol_type = other DNA
gatacgatcgagatatgaatata

SEQ ID NO: 11930 - DNA, 23 bp, synthetic construct
  misc_feature 1..23: note = Synthetic construct
  source 1..23: mol_type = other DNA
atacgatcgagatatgaatatag

SEQ ID NO: 11931 - DNA, 23 bp, synthetic construct
  misc_feature 1..23: note = Synthetic construct
  source 1..23: mol_type = other DNA
tacgatcgagatatgaatatagc

SEQ ID NO: 11932 - DNA, 23 bp, synthetic construct
  misc_feature 1..23: note = Synthetic construct
  source 1..23: mol_type = other DNA
acgatcgagatatgaatatagct

SEQ ID NO: 11933 - DNA, 23 bp, synthetic construct
  misc_feature 1..23: note = Synthetic construct
  source 1..23: mol_type = other DNA
cgatcgagatatgaatatagctc

SEQ ID NO: 11934 - DNA, 23 bp, synthetic construct
  misc_feature 1..23: note = Synthetic construct
  source 1..23: mol_type = other DNA
gatcgagatatgaatatagctct

SEQ ID NO: 11935 - DNA, 23 bp, synthetic construct
  misc_feature 1..23: note = Synthetic construct
  source 1..23: mol_type = other DNA
atcgagatatgaatatagctctg

SEQ ID NO: 11936 - DNA, 23 bp, synthetic construct
  misc_feature 1..23: note = Synthetic construct
  source 1..23: mol_type = other DNA
tcgagatatgaatatagctctgg

SEQ ID NO: 11937 - DNA, 23 bp, synthetic construct
  misc_feature 1..23: note = Synthetic construct
  source 1..23: mol_type = other DNA
cgagatatgaatatagctctggt

SEQ ID NO: 11938 - DNA, 23 bp, synthetic construct
  misc_feature 1..23: note = Synthetic construct
  source 1..23: mol_type = other DNA
gagatatgaatatagctctggtg

SEQ ID NO: 11939 - DNA, 23 bp, synthetic construct
  misc_feature 1..23: note = Synthetic construct
  source 1..23: mol_type = other DNA
agatatgaatatagctctggtgg

SEQ ID NO: 11940 - DNA, 23 bp, synthetic construct
  misc_feature 1..23: note = Synthetic construct
  source 1..23: mol_type = other DNA
gatatgaatatagctctggtggg

SEQ ID NO: 11941 - DNA, 23 bp, synthetic construct
  misc_feature 1..23: note = Synthetic construct
  source 1..23: mol_type = other DNA
atatgaatatagctctggtggga

SEQ ID NO: 11942 - DNA, 23 bp, synthetic construct
  misc_feature 1..23: note = Synthetic construct
  source 1..23: mol_type = other DNA
tatgaatatagctctggtgggag

SEQ ID NO: 11943 - DNA, 23 bp, synthetic construct
  misc_feature 1..23: note = Synthetic construct
  source 1..23: mol_type = other DNA
atgaatatagctctggtgggaga

SEQ ID NO: 11944 - DNA, 23 bp, synthetic construct
  misc_feature 1..23: note = Synthetic construct
  source 1..23: mol_type = other DNA
tgaatatagctctggtgggagaa

SEQ ID NO: 11945 - DNA, 23 bp, synthetic construct
  misc_feature 1..23: note = Synthetic construct
  source 1..23: mol_type = other DNA
gaatatagctctggtgggagaaa

SEQ ID NO: 11946 - DNA, 23 bp, synthetic construct
  misc_feature 1..23: note = Synthetic construct
  source 1..23: mol_type = other DNA
aatatagctctggtgggagaaaa

SEQ ID NO: 11947 - DNA, 23 bp, synthetic construct
  misc_feature 1..23: note = Synthetic construct
  source 1..23: mol_type = other DNA
atatagctctggtgggagaaaac

SEQ ID NO: 11948 - DNA, 23 bp, synthetic construct
  misc_feature 1..23: note = Synthetic construct
  source 1..23: mol_type = other DNA
tatagctctggtgggagaaaact

SEQ ID NO: 11949 - DNA, 23 bp, synthetic construct
  misc_feature 1..23: note = Synthetic construct
  source 1..23: mol_type = other DNA
atagctctggtgggagaaaactc

SEQ ID NO: 11950 - DNA, 23 bp, synthetic construct
  misc_feature 1..23: note = Synthetic construct
  source 1..23: mol_type = other DNA
tagctctggtgggagaaaactcc

SEQ ID NO: 11951 - DNA, 23 bp, synthetic construct
  misc_feature 1..23: note = Synthetic construct
  source 1..23: mol_type = other DNA
agctctggtgggagaaaactcca

SEQ ID NO: 11952 - DNA, 23 bp, synthetic construct
  misc_feature 1..23: note = Synthetic construct
  source 1..23: mol_type = other DNA
gctctggtgggagaaaactccac

SEQ ID NO: 11953 - DNA, 23 bp, synthetic construct
  misc_feature 1..23: note = Synthetic construct
  source 1..23: mol_type = other DNA
ctctggtgggagaaaactccaca

SEQ ID NO: 11954 - DNA, 23 bp, synthetic construct
  misc_feature 1..23: note = Synthetic construct
  source 1..23: mol_type = other DNA
tctggtgggagaaaactccacac

SEQ ID NO: 11955 - DNA, 23 bp, synthetic construct
  misc_feature 1..23: note = Synthetic construct
  source 1..23: mol_type = other DNA
ctggtgggagaaaactccacacc

SEQ ID NO: 11956 - DNA, 23 bp, synthetic construct
  misc_feature 1..23: note = Synthetic construct
  source 1..23: mol_type = other DNA
tggtgggagaaaactccacacca

SEQ ID NO: 11957 - DNA, 23 bp, synthetic construct
  misc_feature 1..23: note = Synthetic construct
  source 1..23: mol_type = other DNA
ggtgggagaaaactccacaccag

SEQ ID NO: 11958 - DNA, 23 bp, synthetic construct
  misc_feature 1..23: note = Synthetic construct
  source 1..23: mol_type = other DNA
gtgggagaaaactccacaccagg

SEQ ID NO: 11959 - DNA, 23 bp, synthetic construct
  misc_feature 1..23: note = Synthetic construct
  source 1..23: mol_type = other DNA
tgggagaaaactccacaccaggc

SEQ ID NO: 11960 - DNA, 23 bp, synthetic construct
  misc_feature 1..23: note = Synthetic construct
  source 1..23: mol_type = other DNA
gggagaaaactccacaccaggcg

SEQ ID NO: 11961 - DNA, 23 bp, synthetic construct
  misc_feature 1..23: note = Synthetic construct
  source 1..23: mol_type = other DNA
ggagaaaactccacaccaggcga

SEQ ID NO: 11962 - DNA, 23 bp, synthetic construct
  misc_feature 1..23: note = Synthetic construct
  source 1..23: mol_type = other DNA
gagaaaactccacaccaggcgat

SEQ ID NO: 11963 - DNA, 23 bp, synthetic construct
  misc_feature 1..23: note = Synthetic construct
  source 1..23: mol_type = other DNA
agaaaactccacaccaggcgatc

SEQ ID NO: 11964 - DNA, 23 bp, synthetic construct
  misc_feature 1..23: note = Synthetic construct
  source 1..23: mol_type = other DNA
gaaaactccacaccaggcgatcg

SEQ ID NO: 11965 - DNA, 23 bp, synthetic construct
  misc_feature 1..23: note = Synthetic construct
  source 1..23: mol_type = other DNA
aaaactccacaccaggcgatcgg

SEQ ID NO: 11966 - DNA, 23 bp, synthetic construct
  misc_feature 1..23: note = Synthetic construct
  source 1..23: mol_type = other DNA
aaactccacaccaggcgatcgga

SEQ ID NO: 11967 - DNA, 23 bp, synthetic construct
  misc_feature 1..23: note = Synthetic construct
  source 1..23: mol_type = other DNA
aactccacaccaggcgatcggag

SEQ ID NO: 11968 - DNA, 23 bp, synthetic construct
  misc_feature 1..23: note = Synthetic construct
  source 1..23: mol_type = other DNA
actccacaccaggcgatcggaga

SEQ ID NO: 11969 - DNA, 23 bp, synthetic construct
  misc_feature 1..23: note = Synthetic construct
  source 1..23: mol_type = other DNA
ctccacaccaggcgatcggagat

SEQ ID NO: 11970 - DNA, 23 bp, synthetic construct
  misc_feature 1..23: note = Synthetic construct
  source 1..23: mol_type = other DNA
tccacaccaggcgatcggagatg

SEQ ID NO: 11971 - DNA, 23 bp, synthetic construct
  misc_feature 1..23: note = Synthetic construct
  source 1..23: mol_type = other DNA
ccacaccaggcgatcggagatgg

SEQ ID NO: 11972 - DNA, 23 bp, synthetic construct
  misc_feature 1..23: note = Synthetic construct
  source 1..23: mol_type = other DNA
cacaccaggcgatcggagatgga

SEQ ID NO: 11973 - DNA, 23 bp, synthetic construct
  misc_feature 1..23: note = Synthetic construct
  source 1..23: mol_type = other DNA
acaccaggcgatcggagatggaa

SEQ ID NO: 11974 - DNA, 23 bp, synthetic construct
  misc_feature 1..23: note = Synthetic construct
  source 1..23: mol_type = other DNA
caccaggcgatcggagatggaat

SEQ ID NO: 11975 - DNA, 23 bp, synthetic construct
  misc_feature 1..23: note = Synthetic construct
  source 1..23: mol_type = other DNA
accaggcgatcggagatggaatc

SEQ ID NO: 11976 - DNA, 23 bp, synthetic construct
  misc_feature 1..23: note = Synthetic construct
  source 1..23: mol_type = other DNA
ccaggcgatcggagatggaatcg

SEQ ID NO: 11977 - DNA, 23 bp, synthetic construct
  misc_feature 1..23: note = Synthetic construct
  source 1..23: mol_type = other DNA
caggcgatcggagatggaatcgg

SEQ ID NO: 11978 - DNA, 23 bp, synthetic construct
  misc_feature 1..23: note = Synthetic construct
  source 1..23: mol_type = other DNA
aggcgatcggagatggaatcgga

SEQ ID NO: 11979 - DNA, 23 bp, synthetic construct
  misc_feature 1..23: note = Synthetic construct
  source 1..23: mol_type = other DNA
ggcgatcggagatggaatcggat

SEQ ID NO: 11980 - DNA, 23 bp, synthetic construct
  misc_feature 1..23: note = Synthetic construct
  source 1..23: mol_type = other DNA
gcgatcggagatggaatcggatg

SEQ ID NO: 11981 - DNA, 23 bp, synthetic construct
  misc_feature 1..23: note = Synthetic construct
  source 1..23: mol_type = other DNA
cgatcggagatggaatcggatgc

SEQ ID NO: 11982 - DNA, 23 bp, synthetic construct
  misc_feature 1..23: note = Synthetic construct
  source 1..23: mol_type = other DNA
gatcggagatggaatcggatgca

SEQ ID NO: 11983 - DNA, 23 bp, synthetic construct
  misc_feature 1..23: note = Synthetic construct
  source 1..23: mol_type = other DNA
atcggagatggaatcggatgcag

SEQ ID NO: 11984 - DNA, 23 bp, synthetic construct
  misc_feature 1..23: note = Synthetic construct
  source 1..23: mol_type = other DNA
tcggagatggaatcggatgcaga

SEQ ID NO: 11985 - DNA, 23 bp, synthetic construct
  misc_feature 1..23: note = Synthetic construct
  source 1..23: mol_type = other DNA
cggagatggaatcggatgcagac

SEQ ID NO: 11986 - DNA, 23 bp, synthetic construct
  misc_feature 1..23: note = Synthetic construct
  source 1..23: mol_type = other DNA
ggagatggaatcggatgcagacg

SEQ ID NO: 11987 - DNA, 23 bp, synthetic construct
  misc_feature 1..23: note = Synthetic construct
  source 1..23: mol_type = other DNA
gagatggaatcggatgcagacga

SEQ ID NO: 11988 - DNA, 23 bp, synthetic construct
  misc_feature 1..23: note = Synthetic construct
  source 1..23: mol_type = other DNA
agatggaatcggatgcagacgat

SEQ ID NO: 11989 - DNA, 23 bp, synthetic construct
  misc_feature 1..23: note = Synthetic construct
  source 1..23: mol_type = other DNA
gatggaatcggatgcagacgata

SEQ ID NO: 11990 - DNA, 23 bp, synthetic construct
  misc_feature 1..23: note = Synthetic construct
  source 1..23: mol_type = other DNA
atggaatcggatgcagacgataa

SEQ ID NO: 11991 - DNA, 23 bp, synthetic construct
  misc_feature 1..23: note = Synthetic construct
  source 1..23: mol_type = other DNA
tggaatcggatgcagacgataag

SEQ ID NO: 11992 - DNA, 23 bp, synthetic construct
  misc_feature 1..23: note = Synthetic construct
  source 1..23: mol_type = other DNA
ggaatcggatgcagacgataagt

SEQ ID NO: 11993 - DNA, 23 bp, synthetic construct
  misc_feature 1..23: note = Synthetic construct
  source 1..23: mol_type = other DNA
gaatcggatgcagacgataagtc

SEQ ID NO: 11994 - DNA, 23 bp, synthetic construct
  misc_feature 1..23: note = Synthetic construct
  source 1..23: mol_type = other DNA
aatcggatgcagacgataagtct

SEQ ID NO: 11995 - DNA, 23 bp, synthetic construct
  misc_feature 1..23: note = Synthetic construct
  source 1..23: mol_type = other DNA
atcggatgcagacgataagtcta

SEQ ID NO: 11996 - DNA, 23 bp, synthetic construct
  misc_feature 1..23: note = Synthetic construct
  source 1..23: mol_type = other DNA
tcggatgcagacgataagtctat

SEQ ID NO: 11997 - DNA, 23 bp, synthetic construct
  misc_feature 1..23: note = Synthetic construct
  source 1..23: mol_type = other DNA
cggatgcagacgataagtctatc

SEQ ID NO: 11998 - DNA, 23 bp, synthetic construct
  misc_feature 1..23: note = Synthetic construct
  source 1..23: mol_type = other DNA
ggatgcagacgataagtctatcg

SEQ ID NO: 11999 - DNA, 23 bp, synthetic construct
  misc_feature 1..23: note = Synthetic construct
  source 1..23: mol_type = other DNA
gatgcagacgataagtctatcgt

SEQ ID NO: 12000 - DNA, 23 bp, synthetic construct
  misc_feature 1..23: note = Synthetic construct
  source 1..23: mol_type = other DNA
atgcagacgataagtctatcgtc

SEQ ID NO: 12001 - DNA, 23 bp, synthetic construct
  misc_feature 1..23: note = Synthetic construct
  source 1..23: mol_type = other DNA
tgcagacgataagtctatcgtcg

SEQ ID NO: 12002 - DNA, 23 bp, synthetic construct
  misc_feature 1..23: note = Synthetic construct
  source 1..23: mol_type = other DNA
gcagacgataagtctatcgtcgc

SEQ ID NO: 12003 - DNA, 23 bp, synthetic construct
  misc_feature 1..23: note = Synthetic construct
  source 1..23: mol_type = other DNA
cagacgataagtctatcgtcgca

SEQ ID NO: 12004 - DNA, 23 bp, synthetic construct
  misc_feature 1..23: note = Synthetic construct
  source 1..23: mol_type = other DNA
agacgataagtctatcgtcgcaa

SEQ ID NO: 12005 - DNA, 23 bp, synthetic construct
  misc_feature 1..23: note = Synthetic construct
  source 1..23: mol_type = other DNA
gacgataagtctatcgtcgcaag

SEQ ID NO: 12006 - DNA, 23 bp, synthetic construct
  misc_feature 1..23: note = Synthetic construct
  source 1..23: mol_type = other DNA
acgataagtctatcgtcgcaagc

SEQ ID NO: 12007 - DNA, 23 bp, synthetic construct
  misc_feature 1..23: note = Synthetic construct
  source 1..23: mol_type = other DNA
cgataagtctatcgtcgcaagcg

SEQ ID NO: 12008 - DNA, 23 bp, synthetic construct
  misc_feature 1..23: note = Synthetic construct
  source 1..23: mol_type = other DNA
gataagtctatcgtcgcaagcga

SEQ ID NO: 12009 - DNA, 23 bp, synthetic construct
  misc_feature 1..23: note = Synthetic construct
  source 1..23: mol_type = other DNA
ataagtctatcgtcgcaagcgaa

SEQ ID NO: 12010 - DNA, 23 bp, synthetic construct
  misc_feature 1..23: note = Synthetic construct
  source 1..23: mol_type = other DNA
taagtctatcgtcgcaagcgaac

SEQ ID NO: 12011 - DNA, 23 bp, synthetic construct
  misc_feature 1..23: note = Synthetic construct
  source 1..23: mol_type = other DNA
aagtctatcgtcgcaagcgaacc

SEQ ID NO: 12012 - DNA, 23 bp, synthetic construct
  misc_feature 1..23: note = Synthetic construct
  source 1..23: mol_type = other DNA
agtctatcgtcgcaagcgaacca

SEQ ID NO: 12013 - DNA, 23 bp, synthetic construct
  misc_feature 1..23: note = Synthetic construct
  source 1..23: mol_type = other DNA
gtctatcgtcgcaagcgaaccat

SEQ ID NO: 12014 - DNA, 23 bp, synthetic construct
  misc_feature 1..23: note = Synthetic construct
  source 1..23: mol_type = other DNA
tctatcgtcgcaagcgaaccatc

SEQ ID NO: 12015 - DNA, 23 bp, synthetic construct
  misc_feature 1..23: note = Synthetic construct
  source 1..23: mol_type = other DNA
ctatcgtcgcaagcgaaccatct

SEQ ID NO: 12016 - DNA, 23 bp, synthetic construct
  misc_feature 1..23: note = Synthetic construct
  source 1..23: mol_type = other DNA
tatcgtcgcaagcgaaccatcta

SEQ ID NO: 12017 - DNA, 23 bp, synthetic construct
  misc_feature 1..23: note = Synthetic construct
  source 1..23: mol_type = other DNA
atcgtcgcaagcgaaccatctac

SEQ ID NO: 12018 - DNA, 23 bp, synthetic construct
  misc_feature 1..23: note = Synthetic construct
  source 1..23: mol_type = other DNA
tcgtcgcaagcgaaccatctacg

SEQ ID NO: 12019 - DNA, 23 bp, synthetic construct
  misc_feature 1..23: note = Synthetic construct
  source 1..23: mol_type = other DNA
cgtcgcaagcgaaccatctacgc

SEQ ID NO: 12020 - DNA, 23 bp, synthetic construct
  misc_feature 1..23: note = Synthetic construct
  source 1..23: mol_type = other DNA
gtcgcaagcgaaccatctacgct

SEQ ID NO: 12021 - DNA, 23 bp, synthetic construct
  misc_feature 1..23: note = Synthetic construct
  source 1..23: mol_type = other DNA
tcgcaagcgaaccatctacgctg

SEQ ID NO: 12022 - DNA, 23 bp, synthetic construct
  misc_feature 1..23: note = Synthetic construct
  source 1..23: mol_type = other DNA
cgcaagcgaaccatctacgctgc

SEQ ID NO: 12023 - DNA, 23 bp, synthetic construct
  misc_feature 1..23: note = Synthetic construct
  source 1..23: mol_type = other DNA
gcaagcgaaccatctacgctgcc

SEQ ID NO: 12024 - DNA, 23 bp, synthetic construct
  misc_feature 1..23: note = Synthetic construct
  source 1..23: mol_type = other DNA
caagcgaaccatctacgctgccc

SEQ ID NO: 12025 - DNA, 23 bp, synthetic construct
  misc_feature 1..23: note = Synthetic construct
  source 1..23: mol_type = other DNA
aagcgaaccatctacgctgccct

SEQ ID NO: 12026 - DNA, 23 bp, synthetic construct
  misc_feature 1..23: note = Synthetic construct
  source 1..23: mol_type = other DNA
agcgaaccatctacgctgccctg

SEQ ID NO: 12027 - DNA, 23 bp, synthetic construct
  misc_feature 1..23: note = Synthetic construct
  source 1..23: mol_type = other DNA
gcgaaccatctacgctgccctgc

SEQ ID NO: 12028 - DNA, 23 bp, synthetic construct
  misc_feature 1..23: note = Synthetic construct
  source 1..23: mol_type = other DNA
cgaaccatctacgctgccctgct

SEQ ID NO: 12029 - DNA, 23 bp, synthetic construct
  misc_feature 1..23: note = Synthetic construct
  source 1..23: mol_type = other DNA
gaaccatctacgctgccctgctg

SEQ ID NO: 12030 - DNA, 23 bp, synthetic construct
  misc_feature 1..23: note = Synthetic construct
  source 1..23: mol_type = other DNA
aaccatctacgctgccctgctga

SEQ ID NO: 12031 - DNA, 23 bp, synthetic construct
  misc_feature 1..23: note = Synthetic construct
  source 1..23: mol_type = other DNA
accatctacgctgccctgctgag

SEQ ID NO: 12032 - DNA, 23 bp, synthetic construct
  misc_feature 1..23: note = Synthetic construct
  source 1..23: mol_type = other DNA
ccatctacgctgccctgctgagc

SEQ ID NO: 12033 - DNA, 23 bp, synthetic construct
  misc_feature 1..23: note = Synthetic construct
  source 1..23: mol_type = other DNA
catctacgctgccctgctgagcc

SEQ ID NO: 12034 - DNA, 23 bp, synthetic construct
  misc_feature 1..23: note = Synthetic construct
  source 1..23: mol_type = other DNA
atctacgctgccctgctgagcca

SEQ ID NO: 12035 - DNA, 23 bp, synthetic construct
  misc_feature 1..23: note = Synthetic construct
  source 1..23: mol_type = other DNA
tctacgctgccctgctgagccag

SEQ ID NO: 12036 - DNA, 23 bp, synthetic construct
  misc_feature 1..23: note = Synthetic construct
  source 1..23: mol_type = other DNA
ctacgctgccctgctgagccaga

SEQ ID NO: 12037 - DNA, 23 bp, synthetic construct
  misc_feature 1..23: note = Synthetic construct
  source 1..23: mol_type = other DNA
tacgctgccctgctgagccagac

SEQ ID NO: 12038 - DNA, 23 bp, synthetic construct
  misc_feature 1..23: note = Synthetic construct
  source 1..23: mol_type = other DNA
acgctgccctgctgagccagacg

SEQ ID NO: 12039 - DNA, 23 bp, synthetic construct
  misc_feature 1..23: note = Synthetic construct
  source 1..23: mol_type = other DNA
cgctgccctgctgagccagacgc

SEQ ID NO: 12040 - DNA, 23 bp, synthetic construct
  misc_feature 1..23: note = Synthetic construct
  source 1..23: mol_type = other DNA
gctgccctgctgagccagacgct

SEQ ID NO: 12041 - DNA, 23 bp, synthetic construct
  misc_feature 1..23: note = Synthetic construct
  source 1..23: mol_type = other DNA
ctgccctgctgagccagacgctg

SEQ ID NO: 12042 - DNA, 23 bp, synthetic construct
  misc_feature 1..23: note = Synthetic construct
  source 1..23: mol_type = other DNA
tgccctgctgagccagacgctgg

SEQ ID NO: 12043 - DNA, 23 bp, synthetic construct
  misc_feature 1..23: note = Synthetic construct
  source 1..23: mol_type = other DNA
gccctgctgagccagacgctggt

SEQ ID NO: 12044 - DNA, 23 bp, synthetic construct
  misc_feature 1..23: note = Synthetic construct
  source 1..23: mol_type = other DNA
ccctgctgagccagacgctggtt

SEQ ID NO: 12045 - DNA, 23 bp, synthetic construct
  misc_feature 1..23: note = Synthetic construct
  source 1..23: mol_type = other DNA
cctgctgagccagacgctggttg

SEQ ID NO: 12046 - DNA, 23 bp, synthetic construct
  misc_feature 1..23: note = Synthetic construct
  source 1..23: mol_type = other DNA
ctgctgagccagacgctggttga

SEQ ID NO: 12047 - DNA, 23 bp, synthetic construct
  misc_feature 1..23: note = Synthetic construct
  source 1..23: mol_type = other DNA
tgctgagccagacgctggttgat

SEQ ID NO: 12048 - DNA, 23 bp, synthetic construct
  misc_feature 1..23: note = Synthetic construct
  source 1..23: mol_type = other DNA
gctgagccagacgctggttgatc

SEQ ID NO: 12049 - DNA, 23 bp, synthetic construct
  misc_feature 1..23: note = Synthetic construct
  source 1..23: mol_type = other DNA
ctgagccagacgctggttgatcg

SEQ ID NO: 12050 - DNA, 23 bp, synthetic construct
  misc_feature 1..23: note = Synthetic construct
  source 1..23: mol_type = other DNA
tgagccagacgctggttgatcga

SEQ ID NO: 12051 - DNA, 23 bp, synthetic construct
  misc_feature 1..23: note = Synthetic construct
  source 1..23: mol_type = other DNA
gagccagacgctggttgatcgat

SEQ ID NO: 12052 - DNA, 23 bp, synthetic construct
  misc_feature 1..23: note = Synthetic construct
  source 1..23: mol_type = other DNA
agccagacgctggttgatcgatt

SEQ ID NO: 12053 - DNA, 23 bp, synthetic construct
  misc_feature 1..23: note = Synthetic construct
  source 1..23: mol_type = other DNA
gccagacgctggttgatcgattg

SEQ ID NO: 12054 - DNA, 23 bp, synthetic construct
  misc_feature 1..23: note = Synthetic construct
  source 1..23: mol_type = other DNA
ccagacgctggttgatcgattga

SEQ ID NO: 12055 - DNA, 23 bp, synthetic construct
  misc_feature 1..23: note = Synthetic construct
  source 1..23: mol_type = other DNA
cagacgctggttgatcgattgat

SEQ ID NO: 12056 - DNA, 23 bp, synthetic construct
  misc_feature 1..23: note = Synthetic construct
  source 1..23: mol_type = other DNA
agacgctggttgatcgattgatc

SEQ ID NO: 12057 - DNA, 23 bp, synthetic construct
  misc_feature 1..23: note = Synthetic construct
  source 1..23: mol_type = other DNA
gacgctggttgatcgattgatca

SEQ ID NO: 12058 - DNA, 23 bp, synthetic construct
  misc_feature 1..23: note = Synthetic construct
  source 1..23: mol_type = other DNA
acgctggttgatcgattgatcat

SEQ ID NO: 12059 - DNA, 23 bp, synthetic construct
  misc_feature 1..23: note = Synthetic construct
  source 1..23: mol_type = other DNA
cgctggttgatcgattgatcatt

SEQ ID NO: 12060 - DNA, 23 bp, synthetic construct
  misc_feature 1..23: note = Synthetic construct
  source 1..23: mol_type = other DNA
gctggttgatcgattgatcattc

SEQ ID NO: 12061 - DNA, 23 bp, synthetic construct
  misc_feature 1..23: note = Synthetic construct
  source 1..23: mol_type = other DNA
ctggttgatcgattgatcattca

SEQ ID NO: 12062 - DNA, 23 bp, synthetic construct
  misc_feature 1..23: note = Synthetic construct
  source 1..23: mol_type = other DNA
tggttgatcgattgatcattcag

SEQ ID NO: 12063 - DNA, 23 bp, synthetic construct
  misc_feature 1..23: note = Synthetic construct
  source 1..23: mol_type = other DNA
ggttgatcgattgatcattcagg

SEQ ID NO: 12064 - DNA, 23 bp, synthetic construct
  misc_feature 1..23: note = Synthetic construct
  source 1..23: mol_type = other DNA
gttgatcgattgatcattcaggt

SEQ ID NO: 12065 - DNA, 23 bp, synthetic construct
  misc_feature 1..23: note = Synthetic construct
  source 1..23: mol_type = other DNA
ttgatcgattgatcattcaggtc

SEQ ID NO: 12066 - DNA, 23 bp, synthetic construct
  misc_feature 1..23: note = Synthetic construct
  source 1..23: mol_type = other DNA
tgatcgattgatcattcaggtct

SEQ ID NO: 12067 - DNA, 23 bp, synthetic construct
  misc_feature 1..23: note = Synthetic construct
  source 1..23: mol_type = other DNA
gatcgattgatcattcaggtcta

SEQ ID NO: 12068 - DNA, 23 bp, synthetic construct
  misc_feature 1..23: note = Synthetic construct
  source 1..23: mol_type = other DNA
atcgattgatcattcaggtctat

SEQ ID NO: 12069 - DNA, 23 bp, synthetic construct
  misc_feature 1..23: note = Synthetic construct
  source 1..23: mol_type = other DNA
tcgattgatcattcaggtctata

SEQ ID NO: 12070 - DNA, 23 bp, synthetic construct
  misc_feature 1..23: note = Synthetic construct
  source 1..23: mol_type = other DNA
cgattgatcattcaggtctatac

SEQ ID NO: 12071 - DNA, 23 bp, synthetic construct
  misc_feature 1..23: note = Synthetic construct
  source 1..23: mol_type = other DNA
gattgatcattcaggtctatacc

SEQ ID NO: 12072 - DNA, 23 bp, synthetic construct
  misc_feature 1..23: note = Synthetic construct
  source 1..23: mol_type = other DNA
attgatcattcaggtctatacca

SEQ ID NO: 12073 - DNA, 23 bp, synthetic construct
  misc_feature 1..23: note = Synthetic construct
  source 1..23: mol_type = other DNA
ttgatcattcaggtctataccaa

SEQ ID NO: 12074 - DNA, 23 bp, synthetic construct
  misc_feature 1..23: note = Synthetic construct
  source 1..23: mol_type = other DNA
tgatcattcaggtctataccaac

SEQ ID NO: 12075 - DNA, 23 bp, synthetic construct
  misc_feature 1..23: note = Synthetic construct
  source 1..23: mol_type = other DNA
gatcattcaggtctataccaacg

SEQ ID NO: 12076 - DNA, 23 bp, synthetic construct
  misc_feature 1..23: note = Synthetic construct
  source 1..23: mol_type = other DNA
atcattcaggtctataccaacgg

SEQ ID NO: 12077 - DNA, 23 bp, synthetic construct
  misc_feature 1..23: note = Synthetic construct
  source 1..23: mol_type = other DNA
tcattcaggtctataccaacgga

SEQ ID NO: 12078 - DNA, 23 bp, synthetic construct
  misc_feature 1..23: note = Synthetic construct
  source 1..23: mol_type = other DNA
cattcaggtctataccaacggat

SEQ ID NO: 12079 - DNA, 23 bp, synthetic construct
  misc_feature 1..23: note = Synthetic construct
  source 1..23: mol_type = other DNA
attcaggtctataccaacggatt

SEQ ID NO: 12080 - DNA, 23 bp, synthetic construct
  misc_feature 1..23: note = Synthetic construct
  source 1..23: mol_type = other DNA
ttcaggtctataccaacggattt

SEQ ID NO: 12081 - DNA, 23 bp, synthetic construct
  misc_feature 1..23: note = Synthetic construct
  source 1..23: mol_type = other DNA
tcaggtctataccaacggatttg

SEQ ID NO: 12082 - DNA, 23 bp, synthetic construct
  misc_feature 1..23: note = Synthetic construct
  source 1..23: mol_type = other DNA
caggtctataccaacggatttga

SEQ ID NO: 12083 - DNA, 23 bp, synthetic construct
  misc_feature 1..23: note = Synthetic construct
  source 1..23: mol_type = other DNA
aggtctataccaacggatttgag

SEQ ID NO: 12084 - DNA, 23 bp, synthetic construct
  misc_feature 1..23: note = Synthetic construct
  source 1..23: mol_type = other DNA
ggtctataccaacggatttgagc

SEQ ID NO: 12085 - DNA, 23 bp, synthetic construct
  misc_feature 1..23: note = Synthetic construct
  source 1..23: mol_type = other DNA
gtctataccaacggatttgagcc

SEQ ID NO: 12086 - DNA, 23 bp, synthetic construct
  misc_feature 1..23: note = Synthetic construct
  source 1..23: mol_type = other DNA
tctataccaacggatttgagccg

SEQ ID NO: 12087 - DNA, 23 bp, synthetic construct
  misc_feature 1..23: note = Synthetic construct
  source 1..23: mol_type = other DNA
ctataccaacggatttgagccgg

SEQ ID NO: 12088 - DNA, 23 bp, synthetic construct
  misc_feature 1..23: note = Synthetic construct
  source 1..23: mol_type = other DNA
tataccaacggatttgagccggc

SEQ ID NO: 12089 - DNA, 23 bp, synthetic construct
  misc_feature 1..23: note = Synthetic construct
  source 1..23: mol_type = other DNA
ataccaacggatttgagccggcg

SEQ ID NO: 12090 - DNA, 23 bp, synthetic construct
  misc_feature 1..23: note = Synthetic construct
  source 1..23: mol_type = other DNA
taccaacggatttgagccggcgt

SEQ ID NO: 12091 - DNA, 23 bp, synthetic construct
  misc_feature 1..23: note = Synthetic construct
  source 1..23: mol_type = other DNA
accaacggatttgagccggcgtc

SEQ ID NO: 12092 - DNA, 23 bp, synthetic construct
  misc_feature 1..23: note = Synthetic construct
  source 1..23: mol_type = other DNA
ccaacggatttgagccggcgtct

SEQ ID NO: 12093 - DNA, 23 bp, synthetic construct
  misc_feature 1..23: note = Synthetic construct
  source 1..23: mol_type = other DNA
caacggatttgagccggcgtctg

SEQ ID NO: 12094 - DNA, 23 bp, synthetic construct
  misc_feature 1..23: note = Synthetic construct
  source 1..23: mol_type = other DNA
aacggatttgagccggcgtctga

SEQ ID NO: 12095 - DNA, 23 bp, synthetic construct
  misc_feature 1..23: note = Synthetic construct
  source 1..23: mol_type = other DNA
acggatttgagccggcgtctgat

SEQ ID NO: 12096 - DNA, 23 bp, synthetic construct
  misc_feature 1..23: note = Synthetic construct
  source 1..23: mol_type = other DNA
cggatttgagccggcgtctgatg

SEQ ID NO: 12097 - DNA, 23 bp, synthetic construct
  misc_feature 1..23: note = Synthetic construct
  source 1..23: mol_type = other DNA
ggatttgagccggcgtctgatga

SEQ ID NO: 12098 - DNA, 23 bp, synthetic construct
  misc_feature 1..23: note = Synthetic construct
  source 1..23: mol_type = other DNA
gatttgagccggcgtctgatgaa

SEQ ID NO: 12099 - DNA, 23 bp, synthetic construct
  misc_feature 1..23: note = Synthetic construct
  source 1..23: mol_type = other DNA
atttgagccggcgtctgatgaaa

SEQ ID NO: 12100 - DNA, 23 bp, synthetic construct
  misc_feature 1..23: note = Synthetic construct
  source 1..23: mol_type = other DNA
tttgagccggcgtctgatgaaag

SEQ ID NO: 12101 - DNA, 23 bp, synthetic construct
  misc_feature 1..23: note = Synthetic construct
  source 1..23: mol_type = other DNA
ttgagccggcgtctgatgaaagc

SEQ ID NO: 12102 - DNA, 23 bp, synthetic construct
  misc_feature 1..23: note = Synthetic construct
  source 1..23: mol_type = other DNA
tgagccggcgtctgatgaaagca

SEQ ID NO: 12103 - DNA, 23 bp, synthetic construct
  misc_feature 1..23: note = Synthetic construct
  source 1..23: mol_type = other DNA
gagccggcgtctgatgaaagcac

SEQ ID NO: 12104 - DNA, 23 bp, synthetic construct
  misc_feature 1..23: note = Synthetic construct
  source 1..23: mol_type = other DNA
agccggcgtctgatgaaagcacc

SEQ ID NO: 12105 - DNA, 23 bp, synthetic construct
  misc_feature 1..23: note = Synthetic construct
  source 1..23: mol_type = other DNA
gccggcgtctgatgaaagcaccg

SEQ ID NO: 12106 - DNA, 23 bp, synthetic construct
  misc_feature 1..23: note = Synthetic construct
  source 1..23: mol_type = other DNA
ccggcgtctgatgaaagcaccga

SEQ ID NO: 12107 - DNA, 23 bp, synthetic construct
  misc_feature 1..23: note = Synthetic construct
  source 1..23: mol_type = other DNA
cggcgtctgatgaaagcaccgac

SEQ ID NO: 12108 - DNA, 23 bp, synthetic construct
  misc_feature 1..23: note = Synthetic construct
  source 1..23: mol_type = other DNA
ggcgtctgatgaaagcaccgacc

SEQ ID NO: 12109 - DNA, 23 bp, synthetic construct
  misc_feature 1..23: note = Synthetic construct
  source 1..23: mol_type = other DNA
gcgtctgatgaaagcaccgaccc

SEQ ID NO: 12110 - DNA, 23 bp, synthetic construct
  misc_feature 1..23: note = Synthetic construct
  source 1..23: mol_type = other DNA
cgtctgatgaaagcaccgacccc

SEQ ID NO: 12111 - DNA, 23 bp, synthetic construct
  misc_feature 1..23: note = Synthetic construct
  source 1..23: mol_type = other DNA
gtctgatgaaagcaccgacccct

SEQ ID NO: 12112 - DNA, 23 bp, synthetic construct
  misc_feature 1..23: note = Synthetic construct
  source 1..23: mol_type = other DNA
tctgatgaaagcaccgacccctt

SEQ ID NO: 12113 - DNA, 23 bp, synthetic construct
  misc_feature 1..23: note = Synthetic construct
  source 1..23: mol_type = other DNA
ctgatgaaagcaccgaccccttt

SEQ ID NO: 12114 - DNA, 23 bp, synthetic construct
  misc_feature 1..23: note = Synthetic construct
  source 1..23: mol_type = other DNA
tgatgaaagcaccgacccctttc

SEQ ID NO: 12115 - DNA, 23 bp, synthetic construct
  misc_feature 1..23: note = Synthetic construct
  source 1..23: mol_type = other DNA
gatgaaagcaccgacccctttct

SEQ ID NO: 12116 - DNA, 23 bp, synthetic construct
  misc_feature 1..23: note = Synthetic construct
  source 1..23: mol_type = other DNA
atgaaagcaccgacccctttctg

SEQ ID NO: 12117 - DNA, 23 bp, synthetic construct
  misc_feature 1..23: note = Synthetic construct
  source 1..23: mol_type = other DNA
tgaaagcaccgacccctttctgg

SEQ ID NO: 12118 - DNA, 23 bp, synthetic construct
  misc_feature 1..23: note = Synthetic construct
  source 1..23: mol_type = other DNA
gaaagcaccgacccctttctgga

SEQ ID NO: 12119 - DNA, 23 bp, synthetic construct
  misc_feature 1..23: note = Synthetic construct
  source 1..23: mol_type = other DNA
aaagcaccgacccctttctggag

SEQ ID NO: 12120 - DNA, 23 bp, synthetic construct
  misc_feature 1..23: note = Synthetic construct
  source 1..23: mol_type = other DNA
aagcaccgacccctttctggagg

SEQ ID NO: 12121 - DNA, 23 bp, synthetic construct
  misc_feature 1..23: note = Synthetic construct
  source 1..23: mol_type = other DNA
agcaccgacccctttctggaggt

SEQ ID NO: 12122 - DNA, 23 bp, synthetic construct
  misc_feature 1..23: note = Synthetic construct
  source 1..23: mol_type = other DNA
gcaccgacccctttctggaggta

SEQ ID NO: 12123 - DNA, 23 bp, synthetic construct
  misc_feature 1..23: note = Synthetic construct
  source 1..23: mol_type = other DNA
caccgacccctttctggaggtac

SEQ ID NO: 12124 - DNA, 23 bp, synthetic construct
  misc_feature 1..23: note = Synthetic construct
  source 1..23: mol_type = other DNA
accgacccctttctggaggtaca

SEQ ID NO: 12125 - DNA, 23 bp, synthetic construct
  misc_feature 1..23: note = Synthetic construct
  source 1..23: mol_type = other DNA
ccgacccctttctggaggtacat

SEQ ID NO: 12126 - DNA, 23 bp, synthetic construct
  misc_feature 1..23: note = Synthetic construct
  source 1..23: mol_type = other DNA
cgacccctttctggaggtacata

SEQ ID NO: 12127 - DNA, 23 bp, synthetic construct
  misc_feature 1..23: note = Synthetic construct
  source 1..23: mol_type = other DNA
gacccctttctggaggtacatat

SEQ ID NO: 12128 - DNA, 23 bp, synthetic construct
  misc_feature 1..23: note = Synthetic construct
  source 1..23: mol_type = other DNA
acccctttctggaggtacatatt

SEQ ID NO: 12129 - DNA, 23 bp, synthetic construct
  misc_feature 1..23: note = Synthetic construct
  source 1..23: mol_type = other DNA
cccctttctggaggtacatattc

SEQ ID NO: 12130 - DNA, 23 bp, synthetic construct
  misc_feature 1..23: note = Synthetic construct
  source 1..23: mol_type = other DNA
ccctttctggaggtacatattca

SEQ ID NO: 12131 - DNA, 23 bp, synthetic construct
  misc_feature 1..23: note = Synthetic construct
  source 1..23: mol_type = other DNA
cctttctggaggtacatattcat

SEQ ID NO: 12132 - DNA, 23 bp, synthetic construct
  misc_feature 1..23: note = Synthetic construct
  source 1..23: mol_type = other DNA
ctttctggaggtacatattcata

SEQ ID NO: 12133 - DNA, 23 bp, synthetic construct
  misc_feature 1..23: note = Synthetic construct
  source 1..23: mol_type = other DNA
tttctggaggtacatattcatat

SEQ ID NO: 12134 - DNA, 23 bp, synthetic construct
  misc_feature 1..23: note = Synthetic construct
  source 1..23: mol_type = other DNA
ttctggaggtacatattcatatc

SEQ ID NO: 12135 - DNA, 23 bp, synthetic construct
  misc_feature 1..23: note = Synthetic construct
  source 1..23: mol_type = other DNA
tctggaggtacatattcatatca

SEQ ID NO: 12136 - DNA, 23 bp, synthetic construct
  misc_feature 1..23: note = Synthetic construct
  source 1..23: mol_type = other DNA
ctggaggtacatattcatatcag

SEQ ID NO: 12137 - DNA, 23 bp, synthetic construct
  misc_feature 1..23: note = Synthetic construct
  source 1..23: mol_type = other DNA
tggaggtacatattcatatcagg

SEQ ID NO: 12138 - DNA, 23 bp, synthetic construct
  misc_feature 1..23: note = Synthetic construct
  source 1..23: mol_type = other DNA
ggaggtacatattcatatcaggc

SEQ ID NO: 12139 - DNA, 23 bp, synthetic construct
  misc_feature 1..23: note = Synthetic construct
  source 1..23: mol_type = other DNA
gaggtacatattcatatcaggct

SEQ ID NO: 12140 - DNA, 23 bp, synthetic construct
  misc_feature 1..23: note = Synthetic construct
  source 1..23: mol_type = other DNA
aggtacatattcatatcaggctc

SEQ ID NO: 12141 - DNA, 23 bp, synthetic construct
  misc_feature 1..23: note = Synthetic construct
  source 1..23: mol_type = other DNA
ggtacatattcatatcaggctcc

SEQ ID NO: 12142 - DNA, 23 bp, synthetic construct
  misc_feature 1..23: note = Synthetic construct
  source 1..23: mol_type = other DNA
gtacatattcatatcaggctcct

SEQ ID NO: 12143 - DNA, 23 bp, synthetic construct
  misc_feature 1..23: note = Synthetic construct
  source 1..23: mol_type = other DNA
tacatattcatatcaggctcctt

SEQ ID NO: 12144 - DNA, 23 bp, synthetic construct
  misc_feature 1..23: note = Synthetic construct
  source 1..23: mol_type = other DNA
acatattcatatcaggctcctta

SEQ ID NO: 12145 - DNA, 23 bp, synthetic construct
  misc_feature 1..23: note = Synthetic construct
  source 1..23: mol_type = other DNA
catattcatatcaggctccttac

SEQ ID NO: 12146 - DNA, 23 bp, synthetic construct
  misc_feature 1..23: note = Synthetic construct
  source 1..23: mol_type = other DNA
atattcatatcaggctccttaca

SEQ ID NO: 12147 - DNA, 23 bp, synthetic construct
  misc_feature 1..23: note = Synthetic construct
  source 1..23: mol_type = other DNA
tattcatatcaggctccttacag

SEQ ID NO: 12148 - DNA, 23 bp, synthetic construct
  misc_feature 1..23: note = Synthetic construct
  source 1..23: mol_type = other DNA
attcatatcaggctccttacagg

SEQ ID NO: 12149 - DNA, 23 bp, synthetic construct
  misc_feature 1..23: note = Synthetic construct
  source 1..23: mol_type = other DNA
ttcatatcaggctccttacaggc

SEQ ID NO: 12150 - DNA, 23 bp, synthetic construct
  misc_feature 1..23: note = Synthetic construct
  source 1..23: mol_type = other DNA
tcatatcaggctccttacaggca

SEQ ID NO: 12151 - DNA, 23 bp, synthetic construct
  misc_feature 1..23: note = Synthetic construct
  source 1..23: mol_type = other DNA
catatcaggctccttacaggcag

SEQ ID NO: 12152 - DNA, 23 bp, synthetic construct
  misc_feature 1..23: note = Synthetic construct
  source 1..23: mol_type = other DNA
atatcaggctccttacaggcagc

SEQ ID NO: 12153 - DNA, 23 bp, synthetic construct
  misc_feature 1..23: note = Synthetic construct
  source 1..23: mol_type = other DNA
tatcaggctccttacaggcagcc

SEQ ID NO: 12154 - DNA, 23 bp, synthetic construct
  misc_feature 1..23: note = Synthetic construct
  source 1..23: mol_type = other DNA
atcaggctccttacaggcagccc

SEQ ID NO: 12155 - DNA, 23 bp, synthetic construct
  misc_feature 1..23: note = Synthetic construct
  source 1..23: mol_type = other DNA
tcaggctccttacaggcagcccg

SEQ ID NO: 12156 - DNA, 23 bp, synthetic construct
  misc_feature 1..23: note = Synthetic construct
  source 1..23: mol_type = other DNA
caggctccttacaggcagcccga

SEQ ID NO: 12157 - DNA, 23 bp, synthetic construct
  misc_feature 1..23: note = Synthetic construct
  source 1..23: mol_type = other DNA
aggctccttacaggcagcccgat

SEQ ID NO: 12158 - DNA, 23 bp, synthetic construct
  misc_feature 1..23: note = Synthetic construct
  source 1..23: mol_type = other DNA
ggctccttacaggcagcccgatc

SEQ ID NO: 12159 - DNA, 23 bp, synthetic construct
  misc_feature 1..23: note = Synthetic construct
  source 1..23: mol_type = other DNA
gctccttacaggcagcccgatct

SEQ ID NO: 12160 - DNA, 23 bp, synthetic construct
  misc_feature 1..23: note = Synthetic construct
  source 1..23: mol_type = other DNA
ctccttacaggcagcccgatcta

SEQ ID NO: 12161 - DNA, 23 bp, synthetic construct
  misc_feature 1..23: note = Synthetic construct
  source 1..23: mol_type = other DNA
tccttacaggcagcccgatctat

SEQ ID NO: 12162 - DNA, 23 bp, synthetic construct
  misc_feature 1..23: note = Synthetic construct
  source 1..23: mol_type = other DNA
ccttacaggcagcccgatctatt

SEQ ID NO: 12163 - DNA, 23 bp, synthetic construct
  misc_feature 1..23: note = Synthetic construct
  source 1..23: mol_type = other DNA
cttacaggcagcccgatctattt

SEQ ID NO: 12164 - DNA, 23 bp, synthetic construct
  misc_feature 1..23: note = Synthetic construct
  source 1..23: mol_type = other DNA
ttacaggcagcccgatctatttt

SEQ ID NO: 12165 - DNA, 23 bp, synthetic construct
  misc_feature 1..23: note = Synthetic construct
  source 1..23: mol_type = other DNA
tacaggcagcccgatctatttta

SEQ ID NO: 12166 - DNA, 23 bp, synthetic construct
  misc_feature 1..23: note = Synthetic construct
  source 1..23: mol_type = other DNA
acaggcagcccgatctattttat

SEQ ID NO: 12167 - DNA, 23 bp, synthetic construct
  misc_feature 1..23: note = Synthetic construct
  source 1..23: mol_type = other DNA
caggcagcccgatctattttatt

SEQ ID NO: 12168 - DNA, 23 bp, synthetic construct
  misc_feature 1..23: note = Synthetic construct
  source 1..23: mol_type = other DNA
aggcagcccgatctattttatta

SEQ ID NO: 12169 - DNA, 23 bp, synthetic construct
  misc_feature 1..23: note = Synthetic construct
  source 1..23: mol_type = other DNA
ggcagcccgatctattttattat

SEQ ID NO: 12170 - DNA, 23 bp, synthetic construct
  misc_feature 1..23: note = Synthetic construct
  source 1..23: mol_type = other DNA
gcagcccgatctattttattatt

SEQ ID NO: 12171 - DNA, 23 bp, synthetic construct
  misc_feature 1..23: note = Synthetic construct
  source 1..23: mol_type = other DNA
cagcccgatctattttattattc

SEQ ID NO: 12172 - DNA, 23 bp, synthetic construct
  misc_feature 1..23: note = Synthetic construct
  source 1..23: mol_type = other DNA
agcccgatctattttattattct

SEQ ID NO: 12173 - DNA, 23 bp, synthetic construct
  misc_feature 1..23: note = Synthetic construct
  source 1..23: mol_type = other DNA
gcccgatctattttattattctt

SEQ ID NO: 12174 - DNA, 23 bp, synthetic construct
  misc_feature 1..23: note = Synthetic construct
  source 1..23: mol_type = other DNA
cccgatctattttattattcttc

SEQ ID NO: 12175 - DNA, 23 bp, synthetic construct
  misc_feature 1..23: note = Synthetic construct
  source 1..23: mol_type = other DNA
ccgatctattttattattcttcg

SEQ ID NO: 12176 - DNA, 23 bp, synthetic construct
  misc_feature 1..23: note = Synthetic construct
  source 1..23: mol_type = other DNA
cgatctattttattattcttcgg

SEQ ID NO: 12177 - DNA, 23 bp, synthetic construct
  misc_feature 1..23: note = Synthetic construct
  source 1..23: mol_type = other DNA
gatctattttattattcttcgga

SEQ ID NO: 12178 - DNA, 23 bp, synthetic construct
  misc_feature 1..23: note = Synthetic construct
  source 1..23: mol_type = other DNA
atctattttattattcttcggaa

SEQ ID NO: 12179 - DNA, 23 bp, synthetic construct
  misc_feature 1..23: note = Synthetic construct
  source 1..23: mol_type = other DNA
tctattttattattcttcggaac

SEQ ID NO: 12180 - DNA, 23 bp, synthetic construct
  misc_feature 1..23: note = Synthetic construct
  source 1..23: mol_type = other DNA
ctattttattattcttcggaact

SEQ ID NO: 12181 - DNA, 23 bp, synthetic construct
  misc_feature 1..23: note = Synthetic construct
  source 1..23: mol_type = other DNA
tattttattattcttcggaactg

SEQ ID NO: 12182 - DNA, 23 bp, synthetic construct
  misc_feature 1..23: note = Synthetic construct
  source 1..23: mol_type = other DNA
attttattattcttcggaactgt

SEQ ID NO: 12183 - DNA, 23 bp, synthetic construct
  misc_feature 1..23: note = Synthetic construct
  source 1..23: mol_type = other DNA
ttttattattcttcggaactgta

SEQ ID NO: 12184 - DNA, 23 bp, synthetic construct
  misc_feature 1..23: note = Synthetic construct
  source 1..23: mol_type = other DNA
tttattattcttcggaactgtaa

SEQ ID NO: 12185 - DNA, 23 bp, synthetic construct
  misc_feature 1..23: note = Synthetic construct
  source 1..23: mol_type = other DNA
ttattattcttcggaactgtaaa

SEQ ID NO: 12186 - DNA, 23 bp, synthetic construct
  misc_feature 1..23: note = Synthetic construct
  source 1..23: mol_type = other DNA
tattattcttcggaactgtaaac

SEQ ID NO: 12187 - DNA, 23 bp, synthetic construct
  misc_feature 1..23: note = Synthetic construct
  source 1..23: mol_type = other DNA
attattcttcggaactgtaaaca

SEQ ID NO: 12188 - DNA, 23 bp, synthetic construct
  misc_feature 1..23: note = Synthetic construct
  source 1..23: mol_type = other DNA
ttattcttcggaactgtaaacac

SEQ ID NO: 12189 - DNA, 23 bp, synthetic construct
  misc_feature 1..23: note = Synthetic construct
  source 1..23: mol_type = other DNA
tattcttcggaactgtaaacact

SEQ ID NO: 12190 - DNA, 23 bp, synthetic construct
  misc_feature 1..23: note = Synthetic construct
  source 1..23: mol_type = other DNA
attcttcggaactgtaaacactc

SEQ ID NO: 12191 - DNA, 23 bp, synthetic construct
  misc_feature 1..23: note = Synthetic construct
  source 1..23: mol_type = other DNA
ttcttcggaactgtaaacactcc

SEQ ID NO: 12192 - DNA, 23 bp, synthetic construct
  misc_feature 1..23: note = Synthetic construct
  source 1..23: mol_type = other DNA
tcttcggaactgtaaacactccg

SEQ ID NO: 12193 - DNA, 23 bp, synthetic construct
  misc_feature 1..23: note = Synthetic construct
  source 1..23: mol_type = other DNA
cttcggaactgtaaacactccgt

SEQ ID NO: 12194 - DNA, 23 bp, synthetic construct
  misc_feature 1..23: note = Synthetic construct
  source 1..23: mol_type = other DNA
ttcggaactgtaaacactccgtt

SEQ ID NO: 12195 - DNA, 23 bp, synthetic construct
  misc_feature 1..23: note = Synthetic construct
  source 1..23: mol_type = other DNA
tcggaactgtaaacactccgttc

SEQ ID NO: 12196 - DNA, 23 bp, synthetic construct
  misc_feature 1..23: note = Synthetic construct
  source 1..23: mol_type = other DNA
cggaactgtaaacactccgttcc

SEQ ID NO: 12197 - DNA, 23 bp, synthetic construct
  misc_feature 1..23: note = Synthetic construct
  source 1..23: mol_type = other DNA
ggaactgtaaacactccgttccc

SEQ ID NO: 12198 - DNA, 23 bp, synthetic construct
  misc_feature 1..23: note = Synthetic construct
  source 1..23: mol_type = other DNA
gaactgtaaacactccgttccct

SEQ ID NO: 12199 - DNA, 23 bp, synthetic construct
  misc_feature 1..23: note = Synthetic construct
  source 1..23: mol_type = other DNA
aactgtaaacactccgttcccta

SEQ ID NO: 12200 - DNA, 23 bp, synthetic construct
  misc_feature 1..23: note = Synthetic construct
  source 1..23: mol_type = other DNA
actgtaaacactccgttccctac

SEQ ID NO: 12201 - DNA, 23 bp, synthetic construct
  misc_feature 1..23: note = Synthetic construct
  source 1..23: mol_type = other DNA
ctgtaaacactccgttccctaca

SEQ ID NO: 12202 - DNA, 23 bp, synthetic construct
  misc_feature 1..23: note = Synthetic construct
  source 1..23: mol_type = other DNA
tgtaaacactccgttccctacaa

SEQ ID NO: 12203 - DNA, 23 bp, synthetic construct
  misc_feature 1..23: note = Synthetic construct
  source 1..23: mol_type = other DNA
gtaaacactccgttccctacaac

SEQ ID NO: 12204 - DNA, 23 bp, synthetic construct
  misc_feature 1..23: note = Synthetic construct
  source 1..23: mol_type = other DNA
taaacactccgttccctacaacg

SEQ ID NO: 12205 - DNA, 23 bp, synthetic construct
  misc_feature 1..23: note = Synthetic construct
  source 1..23: mol_type = other DNA
aaacactccgttccctacaacga

SEQ ID NO: 12206 - DNA, 23 bp, synthetic construct
  misc_feature 1..23: note = Synthetic construct
  source 1..23: mol_type = other DNA
aacactccgttccctacaacgag

SEQ ID NO: 12207 - DNA, 23 bp, synthetic construct
  misc_feature 1..23: note = Synthetic construct
  source 1..23: mol_type = other DNA
acactccgttccctacaacgagc

SEQ ID NO: 12208 - DNA, 23 bp, synthetic construct
  misc_feature 1..23: note = Synthetic construct
  source 1..23: mol_type = other DNA
cactccgttccctacaacgagcc

SEQ ID NO: 12209 - DNA, 23 bp, synthetic construct
  misc_feature 1..23: note = Synthetic construct
  source 1..23: mol_type = other DNA
actccgttccctacaacgagcct

SEQ ID NO: 12210 - DNA, 23 bp, synthetic construct
  misc_feature 1..23: note = Synthetic construct
  source 1..23: mol_type = other DNA
ctccgttccctacaacgagccta

SEQ ID NO: 12211 - DNA, 23 bp, synthetic construct
  misc_feature 1..23: note = Synthetic construct
  source 1..23: mol_type = other DNA
tccgttccctacaacgagcctaa

SEQ ID NO: 12212 - DNA, 23 bp, synthetic construct
  misc_feature 1..23: note = Synthetic construct
  source 1..23: mol_type = other DNA
ccgttccctacaacgagcctaaa

SEQ ID NO: 12213 - DNA, 23 bp, synthetic construct
  misc_feature 1..23: note = Synthetic construct
  source 1..23: mol_type = other DNA
cgttccctacaacgagcctaaat

SEQ ID NO: 12214 - DNA, 23 bp, synthetic construct
  misc_feature 1..23: note = Synthetic construct
  source 1..23: mol_type = other DNA
gttccctacaacgagcctaaatt

SEQ ID NO: 12215 - DNA, 23 bp, synthetic construct
  misc_feature 1..23: note = Synthetic construct
  source 1..23: mol_type = other DNA
ttccctacaacgagcctaaattc

SEQ ID NO: 12216 - DNA, 23 bp, synthetic construct
  misc_feature 1..23: note = Synthetic construct
  source 1..23: mol_type = other DNA
tccctacaacgagcctaaattca

SEQ ID NO: 12217 - DNA, 23 bp, synthetic construct
  misc_feature 1..23: note = Synthetic construct
  source 1..23: mol_type = other DNA
ccctacaacgagcctaaattcat

SEQ ID NO: 12218 - DNA, 23 bp, synthetic construct
  misc_feature 1..23: note = Synthetic construct
  source 1..23: mol_type = other DNA
cctacaacgagcctaaattcata

SEQ ID NO: 12219 - DNA, 23 bp, synthetic construct
  misc_feature 1..23: note = Synthetic construct
  source 1..23: mol_type = other DNA
ctacaacgagcctaaattcatat

SEQ ID NO: 12220 - DNA, 23 bp, synthetic construct
  misc_feature 1..23: note = Synthetic construct
  source 1..23: mol_type = other DNA
tacaacgagcctaaattcatatg

SEQ ID NO: 12221 - DNA, 23 bp, synthetic construct
  misc_feature 1..23: note = Synthetic construct
  source 1..23: mol_type = other DNA
acaacgagcctaaattcatatga

SEQ ID NO: 12222 - DNA, 23 bp, synthetic construct
  misc_feature 1..23: note = Synthetic construct
  source 1..23: mol_type = other DNA
caacgagcctaaattcatatgac

SEQ ID NO: 12223 - DNA, 23 bp, synthetic construct
  misc_feature 1..23: note = Synthetic construct
  source 1..23: mol_type = other DNA
aacgagcctaaattcatatgact

SEQ ID NO: 12224 - DNA, 23 bp, synthetic construct
  misc_feature 1..23: note = Synthetic construct
  source 1..23: mol_type = other DNA
acgagcctaaattcatatgactc

SEQ ID NO: 12225 - DNA, 23 bp, synthetic construct
  misc_feature 1..23: note = Synthetic construct
  source 1..23: mol_type = other DNA
cgagcctaaattcatatgactcg

SEQ ID NO: 12226 - DNA, 23 bp, synthetic construct
  misc_feature 1..23: note = Synthetic construct
  source 1..23: mol_type = other DNA
gagcctaaattcatatgactcgt

SEQ ID NO: 12227 - DNA, 23 bp, synthetic construct
  misc_feature 1..23: note = Synthetic construct
  source 1..23: mol_type = other DNA
agcctaaattcatatgactcgtt

SEQ ID NO: 12228 - DNA, 23 bp, synthetic construct
  misc_feature 1..23: note = Synthetic construct
  source 1..23: mol_type = other DNA
gcctaaattcatatgactcgtta

SEQ ID NO: 12229 - DNA, 23 bp, synthetic construct
  misc_feature 1..23: note = Synthetic construct
  source 1..23: mol_type = other DNA
cctaaattcatatgactcgttat

SEQ ID NO: 12230 - DNA, 23 bp, synthetic construct
  misc_feature 1..23: note = Synthetic construct
  source 1..23: mol_type = other DNA
ctaaattcatatgactcgttata

SEQ ID NO: 12231 - DNA, 23 bp, synthetic construct
  misc_feature 1..23: note = Synthetic construct
  source 1..23: mol_type = other DNA
taaattcatatgactcgttatag

SEQ ID NO: 12232 - DNA, 23 bp, synthetic construct
  misc_feature 1..23: note = Synthetic construct
  source 1..23: mol_type = other DNA
aaattcatatgactcgttatagc

SEQ ID NO: 12233 - DNA, 23 bp, synthetic construct
  misc_feature 1..23: note = Synthetic construct
  source 1..23: mol_type = other DNA
aattcatatgactcgttatagcg

SEQ ID NO: 12234 - DNA, 23 bp, synthetic construct
  misc_feature 1..23: note = Synthetic construct
  source 1..23: mol_type = other DNA
attcatatgactcgttatagcgg

SEQ ID NO: 12235 - DNA, 23 bp, synthetic construct
  misc_feature 1..23: note = Synthetic construct
  source 1..23: mol_type = other DNA
ttcatatgactcgttatagcgga

SEQ ID NO: 12236 - DNA, 23 bp, synthetic construct
  misc_feature 1..23: note = Synthetic construct
  source 1..23: mol_type = other DNA
tcatatgactcgttatagcggac

SEQ ID NO: 12237 - DNA, 23 bp, synthetic construct
  misc_feature 1..23: note = Synthetic construct
  source 1..23: mol_type = other DNA
catatgactcgttatagcggacc

SEQ ID NO: 12238 - DNA, 23 bp, synthetic construct
  misc_feature 1..23: note = Synthetic construct
  source 1..23: mol_type = other DNA
atatgactcgttatagcggaccg

SEQ ID NO: 12239 - DNA, 23 bp, synthetic construct
  misc_feature 1..23: note = Synthetic construct
  source 1..23: mol_type = other DNA
tatgactcgttatagcggaccgc

SEQ ID NO: 12240 - DNA, 23 bp, synthetic construct
  misc_feature 1..23: note = Synthetic construct
  source 1..23: mol_type = other DNA
atgactcgttatagcggaccgcg

SEQ ID NO: 12241 - DNA, 23 bp, synthetic construct
  misc_feature 1..23: note = Synthetic construct
  source 1..23: mol_type = other DNA
tgactcgttatagcggaccgcgt

SEQ ID NO: 12242 - DNA, 23 bp, synthetic construct
  misc_feature 1..23: note = Synthetic construct
  source 1..23: mol_type = other DNA
gactcgttatagcggaccgcgtg

SEQ ID NO: 12243 - DNA, 23 bp, synthetic construct
  misc_feature 1..23: note = Synthetic construct
  source 1..23: mol_type = other DNA
actcgttatagcggaccgcgtgt

SEQ ID NO: 12244 - DNA, 23 bp, synthetic construct
  misc_feature 1..23: note = Synthetic construct
  source 1..23: mol_type = other DNA
ctcgttatagcggaccgcgtgtc

SEQ ID NO: 12245 - DNA, 23 bp, synthetic construct
  misc_feature 1..23: note = Synthetic construct
  source 1..23: mol_type = other DNA
tcgttatagcggaccgcgtgtct

SEQ ID NO: 12246 - DNA, 23 bp, synthetic construct
  misc_feature 1..23: note = Synthetic construct
  source 1..23: mol_type = other DNA
cgttatagcggaccgcgtgtctg

SEQ ID NO: 12247 - DNA, 23 bp, synthetic construct
  misc_feature 1..23: note = Synthetic construct
  source 1..23: mol_type = other DNA
gttatagcggaccgcgtgtctga

SEQ ID NO: 12248 - DNA, 23 bp, synthetic construct
  misc_feature 1..23: note = Synthetic construct
  source 1..23: mol_type = other DNA
ttatagcggaccgcgtgtctgat

SEQ ID NO: 12249 - DNA, 23 bp, synthetic construct
  misc_feature 1..23: note = Synthetic construct
  source 1..23: mol_type = other DNA
tatagcggaccgcgtgtctgatc

SEQ ID NO: 12250 - DNA, 23 bp, synthetic construct
  misc_feature 1..23: note = Synthetic construct
  source 1..23: mol_type = other DNA
atagcggaccgcgtgtctgatcc

SEQ ID NO: 12251 - DNA, 23 bp, synthetic construct
  misc_feature 1..23: note = Synthetic construct
  source 1..23: mol_type = other DNA
tagcggaccgcgtgtctgatcca

SEQ ID NO: 12252 - DNA, 23 bp, synthetic construct
  misc_feature 1..23: note = Synthetic construct
  source 1..23: mol_type = other DNA
agcggaccgcgtgtctgatccac

SEQ ID NO: 12253 - DNA, 23 bp, synthetic construct
  misc_feature 1..23: note = Synthetic construct
  source 1..23: mol_type = other DNA
gcggaccgcgtgtctgatccacg

SEQ ID NO: 12254 - DNA, 23 bp, synthetic construct
  misc_feature 1..23: note = Synthetic construct
  source 1..23: mol_type = other DNA
cggaccgcgtgtctgatccacgg

SEQ ID NO: 12255 - DNA, 23 bp, synthetic construct
  misc_feature 1..23: note = Synthetic construct
  source 1..23: mol_type = other DNA
ggaccgcgtgtctgatccacggc

SEQ ID NO: 12256 - DNA, 23 bp, synthetic construct
  misc_feature 1..23: note = Synthetic construct
  source 1..23: mol_type = other DNA
gaccgcgtgtctgatccacggcg

SEQ ID NO: 12257 - DNA, 23 bp, synthetic construct
  misc_feature 1..23: note = Synthetic construct
  source 1..23: mol_type = other DNA
accgcgtgtctgatccacggcgc

SEQ ID NO: 12258 - DNA, 23 bp, synthetic construct
  misc_feature 1..23: note = Synthetic construct
  source 1..23: mol_type = other DNA
ccgcgtgtctgatccacggcgca

SEQ ID NO: 12259 - DNA, 23 bp, synthetic construct
  misc_feature 1..23: note = Synthetic construct
  source 1..23: mol_type = other DNA
cgcgtgtctgatccacggcgcac

SEQ ID NO: 12260 - DNA, 23 bp, synthetic construct
  misc_feature 1..23: note = Synthetic construct
  source 1..23: mol_type = other DNA
gcgtgtctgatccacggcgcaca

SEQ ID NO: 12261 - DNA, 23 bp, synthetic construct
  misc_feature 1..23: note = Synthetic construct
  source 1..23: mol_type = other DNA
cgtgtctgatccacggcgcacat

SEQ ID NO: 12262 - DNA, 23 bp, synthetic construct
  misc_feature 1..23: note = Synthetic construct
  source 1..23: mol_type = other DNA
gtgtctgatccacggcgcacatt

SEQ ID NO: 12263 - DNA, 23 bp, synthetic construct
  misc_feature 1..23: note = Synthetic construct
  source 1..23: mol_type = other DNA
tgtctgatccacggcgcacattg

SEQ ID NO: 12264 - DNA, 23 bp, synthetic construct
  misc_feature 1..23: note = Synthetic construct
  source 1..23: mol_type = other DNA
gtctgatccacggcgcacattgg

SEQ ID NO: 12265 - DNA, 23 bp, synthetic construct
  misc_feature 1..23: note = Synthetic construct
  source 1..23: mol_type = other DNA
tctgatccacggcgcacattggt

SEQ ID NO: 12266 - DNA, 23 bp, synthetic construct
  misc_feature 1..23: note = Synthetic construct
  source 1..23: mol_type = other DNA
ctgatccacggcgcacattggtc

SEQ ID NO: 12267 - DNA, 23 bp, synthetic construct
  misc_feature 1..23: note = Synthetic construct
  source 1..23: mol_type = other DNA
tgatccacggcgcacattggtct

SEQ ID NO: 12268 - DNA, 23 bp, synthetic construct
  misc_feature 1..23: note = Synthetic construct
  source 1..23: mol_type = other DNA
gatccacggcgcacattggtctc

SEQ ID NO: 12269 - DNA, 23 bp, synthetic construct
  misc_feature 1..23: note = Synthetic construct
  source 1..23: mol_type = other DNA
atccacggcgcacattggtctcg

SEQ ID NO: 12270 - DNA, 23 bp, synthetic construct
  misc_feature 1..23: note = Synthetic construct
  source 1..23: mol_type = other DNA
tccacggcgcacattggtctcgg

SEQ ID NO: 12271 - DNA, 23 bp, synthetic construct
  misc_feature 1..23: note = Synthetic construct
  source 1..23: mol_type = other DNA
ccacggcgcacattggtctcgga

SEQ ID NO: 12272 - DNA, 23 bp, synthetic construct
  misc_feature 1..23: note = Synthetic construct
  source 1..23: mol_type = other DNA
cacggcgcacattggtctcggac

SEQ ID NO: 12273 - DNA, 23 bp, synthetic construct
  misc_feature 1..23: note = Synthetic construct
  source 1..23: mol_type = other DNA
acggcgcacattggtctcggacc

SEQ ID NO: 12274 - DNA, 23 bp, synthetic construct
  misc_feature 1..23: note = Synthetic construct
  source 1..23: mol_type = other DNA
cggcgcacattggtctcggacca

SEQ ID NO: 12275 - DNA, 23 bp, synthetic construct
  misc_feature 1..23: note = Synthetic construct
  source 1..23: mol_type = other DNA
ggcgcacattggtctcggaccaa

SEQ ID NO: 12276 - DNA, 23 bp, synthetic construct
  misc_feature 1..23: note = Synthetic construct
  source 1..23: mol_type = other DNA
gcgcacattggtctcggaccaat

SEQ ID NO: 12277 - DNA, 23 bp, synthetic construct
  misc_feature 1..23: note = Synthetic construct
  source 1..23: mol_type = other DNA
cgcacattggtctcggaccaata

SEQ ID NO: 12278 - DNA, 23 bp, synthetic construct
  misc_feature 1..23: note = Synthetic construct
  source 1..23: mol_type = other DNA
gcacattggtctcggaccaatag

SEQ ID NO: 12279 - DNA, 23 bp, synthetic construct
  misc_feature 1..23: note = Synthetic construct
  source 1..23: mol_type = other DNA
cacattggtctcggaccaataga

SEQ ID NO: 12280 - DNA, 23 bp, synthetic construct
  misc_feature 1..23: note = Synthetic construct
  source 1..23: mol_type = other DNA
acattggtctcggaccaatagag

SEQ ID NO: 12281 - DNA, 23 bp, synthetic construct
  misc_feature 1..23: note = Synthetic construct
  source 1..23: mol_type = other DNA
cattggtctcggaccaatagagc

SEQ ID NO: 12282 - DNA, 23 bp, synthetic construct
  misc_feature 1..23: note = Synthetic construct
  source 1..23: mol_type = other DNA
attggtctcggaccaatagagcc

SEQ ID NO: 12283 - DNA, 23 bp, synthetic construct
  misc_feature 1..23: note = Synthetic construct
  source 1..23: mol_type = other DNA
ttggtctcggaccaatagagccg

SEQ ID NO: 12284 - DNA, 23 bp, synthetic construct
  misc_feature 1..23: note = Synthetic construct
  source 1..23: mol_type = other DNA
tggtctcggaccaatagagccgc

SEQ ID NO: 12285 - DNA, 23 bp, synthetic construct
  misc_feature 1..23: note = Synthetic construct
  source 1..23: mol_type = other DNA
ggtctcggaccaatagagccgct

SEQ ID NO: 12286 - DNA, 23 bp, synthetic construct
  misc_feature 1..23: note = Synthetic construct
  source 1..23: mol_type = other DNA
gtctcggaccaatagagccgctc

SEQ ID NO: 12287 - DNA, 23 bp, synthetic construct
  misc_feature 1..23: note = Synthetic construct
  source 1..23: mol_type = other DNA
tctcggaccaatagagccgctct

SEQ ID NO: 12288 - DNA, 23 bp, synthetic construct
  misc_feature 1..23: note = Synthetic construct
  source 1..23: mol_type = other DNA
ctcggaccaatagagccgctctc

SEQ ID NO: 12289 - DNA, 23 bp, synthetic construct
  misc_feature 1..23: note = Synthetic construct
  source 1..23: mol_type = other DNA
tcggaccaatagagccgctctca

SEQ ID NO: 12290 - DNA, 23 bp, synthetic construct
  misc_feature 1..23: note = Synthetic construct
  source 1..23: mol_type = other DNA
cggaccaatagagccgctctcag

SEQ ID NO: 12291 - DNA, 23 bp, synthetic construct
  misc_feature 1..23: note = Synthetic construct
  source 1..23: mol_type = other DNA
ggaccaatagagccgctctcaga

SEQ ID NO: 12292 - DNA, 23 bp, synthetic construct
  misc_feature 1..23: note = Synthetic construct
  source 1..23: mol_type = other DNA
gaccaatagagccgctctcagag

SEQ ID NO: 12293 - DNA, 23 bp, synthetic construct
  misc_feature 1..23: note = Synthetic construct
  source 1..23: mol_type = other DNA
accaatagagccgctctcagagc

SEQ ID NO: 12294 - DNA, 23 bp, synthetic construct
  misc_feature 1..23: note = Synthetic construct
  source 1..23: mol_type = other DNA
ccaatagagccgctctcagagcg

SEQ ID NO: 12295 - DNA, 23 bp, synthetic construct
  misc_feature 1..23: note = Synthetic construct
  source 1..23: mol_type = other DNA
caatagagccgctctcagagcgc

SEQ ID NO: 12296 - DNA, 23 bp, synthetic construct
  misc_feature 1..23: note = Synthetic construct
  source 1..23: mol_type = other DNA
aatagagccgctctcagagcgcg

SEQ ID NO: 12297 - DNA, 23 bp, synthetic construct
  misc_feature 1..23: note = Synthetic construct
  source 1..23: mol_type = other DNA
atagagccgctctcagagcgcgg

SEQ ID NO: 12298 - DNA, 23 bp, synthetic construct
  misc_feature 1..23: note = Synthetic construct
  source 1..23: mol_type = other DNA
tagagccgctctcagagcgcggg

SEQ ID NO: 12299 - DNA, 23 bp, synthetic construct
  misc_feature 1..23: note = Synthetic construct
  source 1..23: mol_type = other DNA
agagccgctctcagagcgcgggg

SEQ ID NO: 12300 - DNA, 23 bp, synthetic construct
  misc_feature 1..23: note = Synthetic construct
  source 1..23: mol_type = other DNA
gagccgctctcagagcgcggggg

SEQ ID NO: 12301 - DNA, 23 bp, synthetic construct
  misc_feature 1..23: note = Synthetic construct
  source 1..23: mol_type = other DNA
agccgctctcagagcgcgggggg

SEQ ID NO: 12302 - DNA, 23 bp, synthetic construct
  misc_feature 1..23: note = Synthetic construct
  source 1..23: mol_type = other DNA
gccgctctcagagcgcggggggt

SEQ ID NO: 12303 - DNA, 23 bp, synthetic construct
  misc_feature 1..23: note = Synthetic construct
  source 1..23: mol_type = other DNA
ccgctctcagagcgcggggggta

SEQ ID NO: 12304 - DNA, 23 bp, synthetic construct
  misc_feature 1..23: note = Synthetic construct
  source 1..23: mol_type = other DNA
cgctctcagagcgcggggggtaa

SEQ ID NO: 12305 - DNA, 23 bp, synthetic construct
  misc_feature 1..23: note = Synthetic construct
  source 1..23: mol_type = other DNA
gctctcagagcgcggggggtaac

SEQ ID NO: 12306 - DNA, 23 bp, synthetic construct
  misc_feature 1..23: note = Synthetic construct
  source 1..23: mol_type = other DNA
ctctcagagcgcggggggtaacg

SEQ ID NO: 12307 - DNA, 23 bp, synthetic construct
  misc_feature 1..23: note = Synthetic construct
  source 1..23: mol_type = other DNA
tctcagagcgcggggggtaacgg

SEQ ID NO: 12308 - DNA, 23 bp, synthetic construct
  misc_feature 1..23: note = Synthetic construct
  source 1..23: mol_type = other DNA
ctcagagcgcggggggtaacggt

SEQ ID NO: 12309 - DNA, 23 bp, synthetic construct
  misc_feature 1..23: note = Synthetic construct
  source 1..23: mol_type = other DNA
tcagagcgcggggggtaacggtt

SEQ ID NO: 12310 - DNA, 23 bp, synthetic construct
  misc_feature 1..23: note = Synthetic construct
  source 1..23: mol_type = other DNA
cagagcgcggggggtaacggttg

SEQ ID NO: 12311 - DNA, 23 bp, synthetic construct
  misc_feature 1..23: note = Synthetic construct
  source 1..23: mol_type = other DNA
agagcgcggggggtaacggttgc

SEQ ID NO: 12312 - DNA, 23 bp, synthetic construct
  misc_feature 1..23: note = Synthetic construct
  source 1..23: mol_type = other DNA
gagcgcggggggtaacggttgct

SEQ ID NO: 12313 - DNA, 23 bp, synthetic construct
  misc_feature 1..23: note = Synthetic construct
  source 1..23: mol_type = other DNA
agcgcggggggtaacggttgctt

SEQ ID NO: 12314 - DNA, 23 bp, synthetic construct
  misc_feature 1..23: note = Synthetic construct
  source 1..23: mol_type = other DNA
gcgcggggggtaacggttgcttg

SEQ ID NO: 12315 - DNA, 23 bp, synthetic construct
  misc_feature 1..23: note = Synthetic construct
  source 1..23: mol_type = other DNA
cgcggggggtaacggttgcttgt

SEQ ID NO: 12316 - DNA, 23 bp, synthetic construct
  misc_feature 1..23: note = Synthetic construct
  source 1..23: mol_type = other DNA
gcggggggtaacggttgcttgtt

SEQ ID NO: 12317 - DNA, 23 bp, synthetic construct
  misc_feature 1..23: note = Synthetic construct
  source 1..23: mol_type = other DNA
cggggggtaacggttgcttgttc

SEQ ID NO: 12318 - DNA, 23 bp, synthetic construct
  misc_feature 1..23: note = Synthetic construct
  source 1..23: mol_type = other DNA
ggggggtaacggttgcttgttca

SEQ ID NO: 12319 - DNA, 23 bp, synthetic construct
  misc_feature 1..23: note = Synthetic construct
  source 1..23: mol_type = other DNA
gggggtaacggttgcttgttcag

SEQ ID NO: 12320 - DNA, 23 bp, synthetic construct
  misc_feature 1..23: note = Synthetic construct
  source 1..23: mol_type = other DNA
ggggtaacggttgcttgttcagc

SEQ ID NO: 12321 - DNA, 23 bp, synthetic construct
  misc_feature 1..23: note = Synthetic construct
  source 1..23: mol_type = other DNA
gggtaacggttgcttgttcagcg

SEQ ID NO: 12322 - DNA, 23 bp, synthetic construct
  misc_feature 1..23: note = Synthetic construct
  source 1..23: mol_type = other DNA
ggtaacggttgcttgttcagcga

SEQ ID NO: 12323 - DNA, 23 bp, synthetic construct
  misc_feature 1..23: note = Synthetic construct
  source 1..23: mol_type = other DNA
gtaacggttgcttgttcagcgaa

SEQ ID NO: 12324 - DNA, 23 bp, synthetic construct
  misc_feature 1..23: note = Synthetic construct
  source 1..23: mol_type = other DNA
taacggttgcttgttcagcgaac

SEQ ID NO: 12325 - DNA, 23 bp, synthetic construct
  misc_feature 1..23: note = Synthetic construct
  source 1..23: mol_type = other DNA
aacggttgcttgttcagcgaact

SEQ ID NO: 12326 - DNA, 23 bp, synthetic construct
  misc_feature 1..23: note = Synthetic construct
  source 1..23: mol_type = other DNA
acggttgcttgttcagcgaactt

SEQ ID NO: 12327 - DNA, 23 bp, synthetic construct
  misc_feature 1..23: note = Synthetic construct
  source 1..23: mol_type = other DNA
cggttgcttgttcagcgaacttc

SEQ ID NO: 12328 - DNA, 23 bp, synthetic construct
  misc_feature 1..23: note = Synthetic construct
  source 1..23: mol_type = other DNA
ggttgcttgttcagcgaacttct

SEQ ID NO: 12329 - DNA, 23 bp, synthetic construct
  misc_feature 1..23: note = Synthetic construct
  source 1..23: mol_type = other DNA
gttgcttgttcagcgaacttctt

SEQ ID NO: 12330 - DNA, 23 bp, synthetic construct
  misc_feature 1..23: note = Synthetic construct
  source 1..23: mol_type = other DNA
ttgcttgttcagcgaacttcttg

SEQ ID NO: 12331 - DNA, 23 bp, synthetic construct
  misc_feature 1..23: note = Synthetic construct
  source 1..23: mol_type = other DNA
tgcttgttcagcgaacttcttgt

SEQ ID NO: 12332 - DNA, 23 bp, synthetic construct
  misc_feature 1..23: note = Synthetic construct
  source 1..23: mol_type = other DNA
gcttgttcagcgaacttcttgta

SEQ ID NO: 12333 - DNA, 23 bp, synthetic construct
  misc_feature 1..23: note = Synthetic construct
  source 1..23: mol_type = other DNA
cttgttcagcgaacttcttgtaa

SEQ ID NO: 12334 - DNA, 23 bp, synthetic construct
  misc_feature 1..23: note = Synthetic construct
  source 1..23: mol_type = other DNA
ttgttcagcgaacttcttgtaag

SEQ ID NO: 12335 - DNA, 23 bp, synthetic construct
  misc_feature 1..23: note = Synthetic construct
  source 1..23: mol_type = other DNA
tgttcagcgaacttcttgtaagg

SEQ ID NO: 12336 - DNA, 23 bp, synthetic construct
  misc_feature 1..23: note = Synthetic construct
  source 1..23: mol_type = other DNA
gttcagcgaacttcttgtaaggc

SEQ ID NO: 12337 - DNA, 23 bp, synthetic construct
  misc_feature 1..23: note = Synthetic construct
  source 1..23: mol_type = other DNA
ttcagcgaacttcttgtaaggcg

SEQ ID NO: 12338 - DNA, 23 bp, synthetic construct
  misc_feature 1..23: note = Synthetic construct
  source 1..23: mol_type = other DNA
tcagcgaacttcttgtaaggcgc

SEQ ID NO: 12339 - DNA, 23 bp, synthetic construct
  misc_feature 1..23: note = Synthetic construct
  source 1..23: mol_type = other DNA
cagcgaacttcttgtaaggcgct

SEQ ID NO: 12340 - DNA, 23 bp, synthetic construct
  misc_feature 1..23: note = Synthetic construct
  source 1..23: mol_type = other DNA
agcgaacttcttgtaaggcgctg

SEQ ID NO: 12341 - DNA, 23 bp, synthetic construct
  misc_feature 1..23: note = Synthetic construct
  source 1..23: mol_type = other DNA
gcgaacttcttgtaaggcgctgc

SEQ ID NO: 12342 - DNA, 23 bp, synthetic construct
  misc_feature 1..23: note = Synthetic construct
  source 1..23: mol_type = other DNA
cgaacttcttgtaaggcgctgca

SEQ ID NO: 12343 - DNA, 23 bp, synthetic construct
  misc_feature 1..23: note = Synthetic construct
  source 1..23: mol_type = other DNA
gaacttcttgtaaggcgctgcat

SEQ ID NO: 12344 - DNA, 23 bp, synthetic construct
  misc_feature 1..23: note = Synthetic construct
  source 1..23: mol_type = other DNA
aacttcttgtaaggcgctgcatc

SEQ ID NO: 12345 - DNA, 23 bp, synthetic construct
  misc_feature 1..23: note = Synthetic construct
  source 1..23: mol_type = other DNA
acttcttgtaaggcgctgcatcc

SEQ ID NO: 12346 - DNA, 23 bp, synthetic construct
  misc_feature 1..23: note = Synthetic construct
  source 1..23: mol_type = other DNA
cttcttgtaaggcgctgcatcct

SEQ ID NO: 12347 - DNA, 23 bp, synthetic construct
  misc_feature 1..23: note = Synthetic construct
  source 1..23: mol_type = other DNA
ttcttgtaaggcgctgcatcctg

SEQ ID NO: 12348 - DNA, 23 bp, synthetic construct
  misc_feature 1..23: note = Synthetic construct
  source 1..23: mol_type = other DNA
tcttgtaaggcgctgcatcctgc

SEQ ID NO: 12349 - DNA, 23 bp, synthetic construct
  misc_feature 1..23: note = Synthetic construct
  source 1..23: mol_type = other DNA
cttgtaaggcgctgcatcctgca

SEQ ID NO: 12350 - DNA, 23 bp, synthetic construct
  misc_feature 1..23: note = Synthetic construct
  source 1..23: mol_type = other DNA
ttgtaaggcgctgcatcctgcaa

SEQ ID NO: 12351 - DNA, 23 bp, synthetic construct
  misc_feature 1..23: note = Synthetic construct
  source 1..23: mol_type = other DNA
tgtaaggcgctgcatcctgcaac

SEQ ID NO: 12352 - DNA, 23 bp, synthetic construct
  misc_feature 1..23: note = Synthetic construct
  source 1..23: mol_type = other DNA
gtaaggcgctgcatcctgcaact

SEQ ID NO: 12353 - DNA, 23 bp, synthetic construct
  misc_feature 1..23: note = Synthetic construct
  source 1..23: mol_type = other DNA
taaggcgctgcatcctgcaactt

SEQ ID NO: 12354 - DNA, 23 bp, synthetic construct
  misc_feature 1..23: note = Synthetic construct
  source 1..23: mol_type = other DNA
aaggcgctgcatcctgcaacttg

SEQ ID NO: 12355 - DNA, 23 bp, synthetic construct
  misc_feature 1..23: note = Synthetic construct
  source 1..23: mol_type = other DNA
aggcgctgcatcctgcaacttgt

SEQ ID NO: 12356 - DNA, 23 bp, synthetic construct
  misc_feature 1..23: note = Synthetic construct
  source 1..23: mol_type = other DNA
ggcgctgcatcctgcaacttgtg

SEQ ID NO: 12357 - DNA, 23 bp, synthetic construct
  misc_feature 1..23: note = Synthetic construct
  source 1..23: mol_type = other DNA
gcgctgcatcctgcaacttgtgc

SEQ ID NO: 12358 - DNA, 23 bp, synthetic construct
  misc_feature 1..23: note = Synthetic construct
  source 1..23: mol_type = other DNA
cgctgcatcctgcaacttgtgcc

SEQ ID NO: 12359 - DNA, 23 bp, synthetic construct
  misc_feature 1..23: note = Synthetic construct
  source 1..23: mol_type = other DNA
gctgcatcctgcaacttgtgccc

SEQ ID NO: 12360 - DNA, 23 bp, synthetic construct
  misc_feature 1..23: note = Synthetic construct
  source 1..23: mol_type = other DNA
ctgcatcctgcaacttgtgcccc

SEQ ID NO: 12361 - DNA, 23 bp, synthetic construct
  misc_feature 1..23: note = Synthetic construct
  source 1..23: mol_type = other DNA
tgcatcctgcaacttgtgcccca

SEQ ID NO: 12362 - DNA, 23 bp, synthetic construct
  misc_feature 1..23: note = Synthetic construct
  source 1..23: mol_type = other DNA
gcatcctgcaacttgtgccccat

SEQ ID NO: 12363 - DNA, 23 bp, synthetic construct
  misc_feature 1..23: note = Synthetic construct
  source 1..23: mol_type = other DNA
catcctgcaacttgtgccccata

SEQ ID NO: 12364 - DNA, 23 bp, synthetic construct
  misc_feature 1..23: note = Synthetic construct
  source 1..23: mol_type = other DNA
atcctgcaacttgtgccccatag

SEQ ID NO: 12365 - DNA, 23 bp, synthetic construct
  misc_feature 1..23: note = Synthetic construct
  source 1..23: mol_type = other DNA
tcctgcaacttgtgccccatagg

SEQ ID NO: 12366 - DNA, 23 bp, synthetic construct
  misc_feature 1..23: note = Synthetic construct
  source 1..23: mol_type = other DNA
cctgcaacttgtgccccatagga

SEQ ID NO: 12367 - DNA, 23 bp, synthetic construct
  misc_feature 1..23: note = Synthetic construct
  source 1..23: mol_type = other DNA
ctgcaacttgtgccccataggag

SEQ ID NO: 12368 - DNA, 23 bp, synthetic construct
  misc_feature 1..23: note = Synthetic construct
  source 1..23: mol_type = other DNA
tgcaacttgtgccccataggagc

SEQ ID NO: 12369 - DNA, 23 bp, synthetic construct
  misc_feature 1..23: note = Synthetic construct
  source 1..23: mol_type = other DNA
gcaacttgtgccccataggagca

SEQ ID NO: 12370 - DNA, 23 bp, synthetic construct
  misc_feature 1..23: note = Synthetic construct
  source 1..23: mol_type = other DNA
caacttgtgccccataggagcac

SEQ ID NO: 12371 - DNA, 23 bp, synthetic construct
  misc_feature 1..23: note = Synthetic construct
  source 1..23: mol_type = other DNA
aacttgtgccccataggagcacc

SEQ ID NO: 12372 - DNA, 23 bp, synthetic construct
  misc_feature 1..23: note = Synthetic construct
  source 1..23: mol_type = other DNA
acttgtgccccataggagcaccg

SEQ ID NO: 12373 - DNA, 23 bp, synthetic construct
  misc_feature 1..23: note = Synthetic construct
  source 1..23: mol_type = other DNA
cttgtgccccataggagcaccgt

SEQ ID NO: 12374 - DNA, 23 bp, synthetic construct
  misc_feature 1..23: note = Synthetic construct
  source 1..23: mol_type = other DNA
ttgtgccccataggagcaccgtt

SEQ ID NO: 12375 - DNA, 23 bp, synthetic construct
  misc_feature 1..23: note = Synthetic construct
  source 1..23: mol_type = other DNA
tgtgccccataggagcaccgttg

SEQ ID NO: 12376 - DNA, 23 bp, synthetic construct
  misc_feature 1..23: note = Synthetic construct
  source 1..23: mol_type = other DNA
gtgccccataggagcaccgttgg

SEQ ID NO: 12377 - DNA, 23 bp, synthetic construct
  misc_feature 1..23: note = Synthetic construct
  source 1..23: mol_type = other DNA
tgccccataggagcaccgttgga

SEQ ID NO: 12378 - DNA, 23 bp, synthetic construct
  misc_feature 1..23: note = Synthetic construct
  source 1..23: mol_type = other DNA
gccccataggagcaccgttggag

SEQ ID NO: 12379 - DNA, 23 bp, synthetic construct
  misc_feature 1..23: note = Synthetic construct
  source 1..23: mol_type = other DNA
ccccataggagcaccgttggaga

SEQ ID NO: 12380 - DNA, 23 bp, synthetic construct
  misc_feature 1..23: note = Synthetic construct
  source 1..23: mol_type = other DNA
cccataggagcaccgttggagaa

SEQ ID NO: 12381 - DNA, 23 bp, synthetic construct
  misc_feature 1..23: note = Synthetic construct
  source 1..23: mol_type = other DNA
ccataggagcaccgttggagaac

SEQ ID NO: 12382 - DNA, 23 bp, synthetic construct
  misc_feature 1..23: note = Synthetic construct
  source 1..23: mol_type = other DNA
cataggagcaccgttggagaacg

SEQ ID NO: 12383 - DNA, 23 bp, synthetic construct
  misc_feature 1..23: note = Synthetic construct
  source 1..23: mol_type = other DNA
ataggagcaccgttggagaacgt

SEQ ID NO: 12384 - DNA, 23 bp, synthetic construct
  misc_feature 1..23: note = Synthetic construct
  source 1..23: mol_type = other DNA
taggagcaccgttggagaacgtg

SEQ ID NO: 12385 - DNA, 23 bp, synthetic construct
  misc_feature 1..23: note = Synthetic construct
  source 1..23: mol_type = other DNA
aggagcaccgttggagaacgtgc

SEQ ID NO: 12386 - DNA, 23 bp, synthetic construct
  misc_feature 1..23: note = Synthetic construct
  source 1..23: mol_type = other DNA
ggagcaccgttggagaacgtgca

SEQ ID NO: 12387 - DNA, 23 bp, synthetic construct
  misc_feature 1..23: note = Synthetic construct
  source 1..23: mol_type = other DNA
gagcaccgttggagaacgtgcat

SEQ ID NO: 12388 - DNA, 23 bp, synthetic construct
  misc_feature 1..23: note = Synthetic construct
  source 1..23: mol_type = other DNA
agcaccgttggagaacgtgcatt

SEQ ID NO: 12389 - DNA, 23 bp, synthetic construct
  misc_feature 1..23: note = Synthetic construct
  source 1..23: mol_type = other DNA
gcaccgttggagaacgtgcattg

SEQ ID NO: 12390 - DNA, 23 bp, synthetic construct
  misc_feature 1..23: note = Synthetic construct
  source 1..23: mol_type = other DNA
caccgttggagaacgtgcattgc

SEQ ID NO: 12391 - DNA, 23 bp, synthetic construct
  misc_feature 1..23: note = Synthetic construct
  source 1..23: mol_type = other DNA
accgttggagaacgtgcattgcc

SEQ ID NO: 12392 - DNA, 23 bp, synthetic construct
  misc_feature 1..23: note = Synthetic construct
  source 1..23: mol_type = other DNA
ccgttggagaacgtgcattgccc

SEQ ID NO: 12393 - DNA, 23 bp, synthetic construct
  misc_feature 1..23: note = Synthetic construct
  source 1..23: mol_type = other DNA
cgttggagaacgtgcattgccca

SEQ ID NO: 12394 - DNA, 23 bp, synthetic construct
  misc_feature 1..23: note = Synthetic construct
  source 1..23: mol_type = other DNA
gttggagaacgtgcattgcccaa

SEQ ID NO: 12395 - DNA, 23 bp, synthetic construct
  misc_feature 1..23: note = Synthetic construct
  source 1..23: mol_type = other DNA
ttggagaacgtgcattgcccaaa

SEQ ID NO: 12396 - DNA, 23 bp, synthetic construct
  misc_feature 1..23: note = Synthetic construct
  source 1..23: mol_type = other DNA
tggagaacgtgcattgcccaaac

SEQ ID NO: 12397 - DNA, 23 bp, synthetic construct
  misc_feature 1..23: note = Synthetic construct
  source 1..23: mol_type = other DNA
ggagaacgtgcattgcccaaaca

SEQ ID NO: 12398 - DNA, 23 bp, synthetic construct
  misc_feature 1..23: note = Synthetic construct
  source 1..23: mol_type = other DNA
gagaacgtgcattgcccaaacaa

SEQ ID NO: 12399 - DNA, 23 bp, synthetic construct
  misc_feature 1..23: note = Synthetic construct
  source 1..23: mol_type = other DNA
agaacgtgcattgcccaaacaac

SEQ ID NO: 12400 - DNA, 23 bp, synthetic construct
  misc_feature 1..23: note = Synthetic construct
  source 1..23: mol_type = other DNA
gaacgtgcattgcccaaacaacg

SEQ ID NO: 12401 - DNA, 23 bp, synthetic construct
  misc_feature 1..23: note = Synthetic construct
  source 1..23: mol_type = other DNA
aacgtgcattgcccaaacaacga

SEQ ID NO: 12402 - DNA, 23 bp, synthetic construct
  misc_feature 1..23: note = Synthetic construct
  source 1..23: mol_type = other DNA
acgtgcattgcccaaacaacgac

SEQ ID NO: 12403 - DNA, 23 bp, synthetic construct
  misc_feature 1..23: note = Synthetic construct
  source 1..23: mol_type = other DNA
cgtgcattgcccaaacaacgacg

SEQ ID NO: 12404 - DNA, 23 bp, synthetic construct
  misc_feature 1..23: note = Synthetic construct
  source 1..23: mol_type = other DNA
gtgcattgcccaaacaacgacga

SEQ ID NO: 12405 - DNA, 23 bp, synthetic construct
  misc_feature 1..23: note = Synthetic construct
  source 1..23: mol_type = other DNA
tgcattgcccaaacaacgacgat

SEQ ID NO: 12406 - DNA, 23 bp, synthetic construct
  misc_feature 1..23: note = Synthetic construct
  source 1..23: mol_type = other DNA
gcattgcccaaacaacgacgatc

SEQ ID NO: 12407 - DNA, 23 bp, synthetic construct
  misc_feature 1..23: note = Synthetic construct
  source 1..23: mol_type = other DNA
cattgcccaaacaacgacgatcg

SEQ ID NO: 12408 - DNA, 23 bp, synthetic construct
  misc_feature 1..23: note = Synthetic construct
  source 1..23: mol_type = other DNA
attgcccaaacaacgacgatcgg

SEQ ID NO: 12409 - DNA, 23 bp, synthetic construct
  misc_feature 1..23: note = Synthetic construct
  source 1..23: mol_type = other DNA
ttgcccaaacaacgacgatcggt

SEQ ID NO: 12410 - DNA, 23 bp, synthetic construct
  misc_feature 1..23: note = Synthetic construct
  source 1..23: mol_type = other DNA
tgcccaaacaacgacgatcggta

SEQ ID NO: 12411 - DNA, 23 bp, synthetic construct
  misc_feature 1..23: note = Synthetic construct
  source 1..23: mol_type = other DNA
gcccaaacaacgacgatcggtag

SEQ ID NO: 12412 - DNA, 23 bp, synthetic construct
  misc_feature 1..23: note = Synthetic construct
  source 1..23: mol_type = other DNA
cccaaacaacgacgatcggtagc

SEQ ID NO: 12413 - DNA, 23 bp, synthetic construct
  misc_feature 1..23: note = Synthetic construct
  source 1..23: mol_type = other DNA
ccaaacaacgacgatcggtagcc

SEQ ID NO: 12414 - DNA, 23 bp, synthetic construct
  misc_feature 1..23: note = Synthetic construct
  source 1..23: mol_type = other DNA
caaacaacgacgatcggtagcca

SEQ ID NO: 12415 - DNA, 23 bp, synthetic construct
  misc_feature 1..23: note = Synthetic construct
  source 1..23: mol_type = other DNA
aaacaacgacgatcggtagccag

SEQ ID NO: 12416 - DNA, 23 bp, synthetic construct
  misc_feature 1..23: note = Synthetic construct
  source 1..23: mol_type = other DNA
aacaacgacgatcggtagccaga

SEQ ID NO: 12417 - DNA, 23 bp, synthetic construct
  misc_feature 1..23: note = Synthetic construct
  source 1..23: mol_type = other DNA
acaacgacgatcggtagccagag

SEQ ID NO: 12418 - DNA, 23 bp, synthetic construct
  misc_feature 1..23: note = Synthetic construct
  source 1..23: mol_type = other DNA
caacgacgatcggtagccagaga

SEQ ID NO: 12419 - DNA, 23 bp, synthetic construct
  misc_feature 1..23: note = Synthetic construct
  source 1..23: mol_type = other DNA
aacgacgatcggtagccagagag

SEQ ID NO: 12420 - DNA, 23 bp, synthetic construct
  misc_feature 1..23: note = Synthetic construct
  source 1..23: mol_type = other DNA
acgacgatcggtagccagagagg

SEQ ID NO: 12421 - DNA, 23 bp, synthetic construct
  misc_feature 1..23: note = Synthetic construct
  source 1..23: mol_type = other DNA
cgacgatcggtagccagagagga

SEQ ID NO: 12422 - DNA, 23 bp, synthetic construct
  misc_feature 1..23: note = Synthetic construct
  source 1..23: mol_type = other DNA
gacgatcggtagccagagaggag

SEQ ID NO: 12423 - DNA, 23 bp, synthetic construct
  misc_feature 1..23: note = Synthetic construct
  source 1..23: mol_type = other DNA
acgatcggtagccagagaggagg

SEQ ID NO: 12424 - DNA, 23 bp, synthetic construct
  misc_feature 1..23: note = Synthetic construct
  source 1..23: mol_type = other DNA
cgatcggtagccagagaggaggt

SEQ ID NO: 12425 - DNA, 23 bp, synthetic construct
  misc_feature 1..23: note = Synthetic construct
  source 1..23: mol_type = other DNA
gatcggtagccagagaggaggtt

SEQ ID NO: 12426 - DNA, 23 bp, synthetic construct
  misc_feature 1..23: note = Synthetic construct
  source 1..23: mol_type = other DNA
atcggtagccagagaggaggttg

SEQ ID NO: 12427 - DNA, 23 bp, synthetic construct
  misc_feature 1..23: note = Synthetic construct
  source 1..23: mol_type = other DNA
tcggtagccagagaggaggttgc

SEQ ID NO: 12428 - DNA, 23 bp, synthetic construct
  misc_feature 1..23: note = Synthetic construct
  source 1..23: mol_type = other DNA
cggtagccagagaggaggttgcc

SEQ ID NO: 12429 - DNA, 23 bp, synthetic construct
  misc_feature 1..23: note = Synthetic construct
  source 1..23: mol_type = other DNA
ggtagccagagaggaggttgcca

SEQ ID NO: 12430 - DNA, 23 bp, synthetic construct
  misc_feature 1..23: note = Synthetic construct
  source 1..23: mol_type = other DNA
gtagccagagaggaggttgccaa

SEQ ID NO: 12431 - DNA, 23 bp, synthetic construct
  misc_feature 1..23: note = Synthetic construct
  source 1..23: mol_type = other DNA
tagccagagaggaggttgccaat

SEQ ID NO: 12432 - DNA, 23 bp, synthetic construct
  misc_feature 1..23: note = Synthetic construct
  source 1..23: mol_type = other DNA
agccagagaggaggttgccaata

SEQ ID NO: 12433 - DNA, 23 bp, synthetic construct
  misc_feature 1..23: note = Synthetic construct
  source 1..23: mol_type = other DNA
gccagagaggaggttgccaataa

SEQ ID NO: 12434 - DNA, 23 bp, synthetic construct
  misc_feature 1..23: note = Synthetic construct
  source 1..23: mol_type = other DNA
ccagagaggaggttgccaataag

SEQ ID NO: 12435 - DNA, 23 bp, synthetic construct
  misc_feature 1..23: note = Synthetic construct
  source 1..23: mol_type = other DNA
cagagaggaggttgccaataagg

SEQ ID NO: 12436 - DNA, 23 bp, synthetic construct
  misc_feature 1..23: note = Synthetic construct
  source 1..23: mol_type = other DNA
agagaggaggttgccaataaggc

SEQ ID NO: 12437 - DNA, 23 bp, synthetic construct
  misc_feature 1..23: note = Synthetic construct
  source 1..23: mol_type = other DNA
gagaggaggttgccaataaggct

SEQ ID NO: 12438 - DNA, 23 bp, synthetic construct
  misc_feature 1..23: note = Synthetic construct
  source 1..23: mol_type = other DNA
agaggaggttgccaataaggcta

SEQ ID NO: 12439 - DNA, 23 bp, synthetic construct
  misc_feature 1..23: note = Synthetic construct
  source 1..23: mol_type = other DNA
gaggaggttgccaataaggctac

SEQ ID NO: 12440 - DNA, 23 bp, synthetic construct
  misc_feature 1..23: note = Synthetic construct
  source 1..23: mol_type = other DNA
aggaggttgccaataaggctacg

SEQ ID NO: 12441 - DNA, 23 bp, synthetic construct
  misc_feature 1..23: note = Synthetic construct
  source 1..23: mol_type = other DNA
ggaggttgccaataaggctacgg

SEQ ID NO: 12442 - DNA, 23 bp, synthetic construct
  misc_feature 1..23: note = Synthetic construct
  source 1..23: mol_type = other DNA
gaggttgccaataaggctacgga

SEQ ID NO: 12443 - DNA, 23 bp, synthetic construct
  misc_feature 1..23: note = Synthetic construct
  source 1..23: mol_type = other DNA
aggttgccaataaggctacggat

SEQ ID NO: 12444 - DNA, 23 bp, synthetic construct
  misc_feature 1..23: note = Synthetic construct
  source 1..23: mol_type = other DNA
ggttgccaataaggctacggatg

SEQ ID NO: 12445 - DNA, 23 bp, synthetic construct
  misc_feature 1..23: note = Synthetic construct
  source 1..23: mol_type = other DNA
gttgccaataaggctacggatgc

SEQ ID NO: 12446 - DNA, 23 bp, synthetic construct
  misc_feature 1..23: note = Synthetic construct
  source 1..23: mol_type = other DNA
ttgccaataaggctacggatgct

SEQ ID NO: 12447 - DNA, 23 bp, synthetic construct
  misc_feature 1..23: note = Synthetic construct
  source 1..23: mol_type = other DNA
tgccaataaggctacggatgctg

SEQ ID NO: 12448 - DNA, 23 bp, synthetic construct
  misc_feature 1..23: note = Synthetic construct
  source 1..23: mol_type = other DNA
gccaataaggctacggatgctgg

SEQ ID NO: 12449 - DNA, 23 bp, synthetic construct
  misc_feature 1..23: note = Synthetic construct
  source 1..23: mol_type = other DNA
ccaataaggctacggatgctggt

SEQ ID NO: 12450 - DNA, 23 bp, synthetic construct
  misc_feature 1..23: note = Synthetic construct
  source 1..23: mol_type = other DNA
caataaggctacggatgctggtt

SEQ ID NO: 12451 - DNA, 23 bp, synthetic construct
  misc_feature 1..23: note = Synthetic construct
  source 1..23: mol_type = other DNA
aataaggctacggatgctggttt

SEQ ID NO: 12452 - DNA, 23 bp, synthetic construct
  misc_feature 1..23: note = Synthetic construct
  source 1..23: mol_type = other DNA
ataaggctacggatgctggtttg

SEQ ID NO: 12453 - DNA, 23 bp, synthetic construct
  misc_feature 1..23: note = Synthetic construct
  source 1..23: mol_type = other DNA
taaggctacggatgctggtttgt

SEQ ID NO: 12454 - DNA, 23 bp, synthetic construct
  misc_feature 1..23: note = Synthetic construct
  source 1..23: mol_type = other DNA
aaggctacggatgctggtttgta

SEQ ID NO: 12455 - DNA, 23 bp, synthetic construct
  misc_feature 1..23: note = Synthetic construct
  source 1..23: mol_type = other DNA
aggctacggatgctggtttgtaa

SEQ ID NO: 12456 - DNA, 23 bp, synthetic construct
  misc_feature 1..23: note = Synthetic construct
  source 1..23: mol_type = other DNA
ggctacggatgctggtttgtaaa

SEQ ID NO: 12457 - DNA, 23 bp, synthetic construct
  misc_feature 1..23: note = Synthetic construct
  source 1..23: mol_type = other DNA
gctacggatgctggtttgtaaaa

SEQ ID NO: 12458 - DNA, 23 bp, synthetic construct
  misc_feature 1..23: note = Synthetic construct
  source 1..23: mol_type = other DNA
ctacggatgctggtttgtaaaac

SEQ ID NO: 12459 - DNA, 23 bp, synthetic construct
  misc_feature 1..23: note = Synthetic construct
  source 1..23: mol_type = other DNA
tacggatgctggtttgtaaaaca

SEQ ID NO: 12460 - DNA, 23 bp, synthetic construct
  misc_feature 1..23: note = Synthetic construct
  source 1..23: mol_type = other DNA
acggatgctggtttgtaaaacat

SEQ ID NO: 12461 - DNA, 23 bp, synthetic construct
  misc_feature 1..23: note = Synthetic construct
  source 1..23: mol_type = other DNA
cggatgctggtttgtaaaacatc

SEQ ID NO: 12462 - DNA, 23 bp, synthetic construct
  misc_feature 1..23: note = Synthetic construct
  source 1..23: mol_type = other DNA
ggatgctggtttgtaaaacatcc

SEQ ID NO: 12463 - DNA, 23 bp, synthetic construct
  misc_feature 1..23: note = Synthetic construct
  source 1..23: mol_type = other DNA
gatgctggtttgtaaaacatccg

SEQ ID NO: 12464 - DNA, 23 bp, synthetic construct
  misc_feature 1..23: note = Synthetic construct
  source 1..23: mol_type = other DNA
atgctggtttgtaaaacatccgg

SEQ ID NO: 12465 - DNA, 23 bp, synthetic construct
  misc_feature 1..23: note = Synthetic construct
  source 1..23: mol_type = other DNA
tgctggtttgtaaaacatccgga

SEQ ID NO: 12466 - DNA, 23 bp, synthetic construct
  misc_feature 1..23: note = Synthetic construct
  source 1..23: mol_type = other DNA
gctggtttgtaaaacatccggat

SEQ ID NO: 12467 - DNA, 23 bp, synthetic construct
  misc_feature 1..23: note = Synthetic construct
  source 1..23: mol_type = other DNA
ctggtttgtaaaacatccggatc

SEQ ID NO: 12468 - DNA, 23 bp, synthetic construct
  misc_feature 1..23: note = Synthetic construct
  source 1..23: mol_type = other DNA
tggtttgtaaaacatccggatcc

SEQ ID NO: 12469 - DNA, 23 bp, synthetic construct
  misc_feature 1..23: note = Synthetic construct
  source 1..23: mol_type = other DNA
ggtttgtaaaacatccggatccc

SEQ ID NO: 12470 - DNA, 23 bp, synthetic construct
  misc_feature 1..23: note = Synthetic construct
  source 1..23: mol_type = other DNA
gtttgtaaaacatccggatccca

SEQ ID NO: 12471 - DNA, 23 bp, synthetic construct
  misc_feature 1..23: note = Synthetic construct
  source 1..23: mol_type = other DNA
tttgtaaaacatccggatcccat

SEQ ID NO: 12472 - DNA, 23 bp, synthetic construct
  misc_feature 1..23: note = Synthetic construct
  source 1..23: mol_type = other DNA
ttgtaaaacatccggatcccatg

SEQ ID NO: 12473 - DNA, 23 bp, synthetic construct
  misc_feature 1..23: note = Synthetic construct
  source 1..23: mol_type = other DNA
tgtaaaacatccggatcccatga

SEQ ID NO: 12474 - DNA, 23 bp, synthetic construct
  misc_feature 1..23: note = Synthetic construct
  source 1..23: mol_type = other DNA
gtaaaacatccggatcccatgac

SEQ ID NO: 12475 - DNA, 23 bp, synthetic construct
  misc_feature 1..23: note = Synthetic construct
  source 1..23: mol_type = other DNA
taaaacatccggatcccatgaca

SEQ ID NO: 12476 - DNA, 23 bp, synthetic construct
  misc_feature 1..23: note = Synthetic construct
  source 1..23: mol_type = other DNA
aaaacatccggatcccatgacaa

SEQ ID NO: 12477 - DNA, 23 bp, synthetic construct
  misc_feature 1..23: note = Synthetic construct
  source 1..23: mol_type = other DNA
aaacatccggatcccatgacaag

SEQ ID NO: 12478 - DNA, 23 bp, synthetic construct
  misc_feature 1..23: note = Synthetic construct
  source 1..23: mol_type = other DNA
aacatccggatcccatgacaagg

SEQ ID NO: 12479 - DNA, 23 bp, synthetic construct
  misc_feature 1..23: note = Synthetic construct
  source 1..23: mol_type = other DNA
acatccggatcccatgacaagga

SEQ ID NO: 12480 - DNA, 23 bp, synthetic construct
  misc_feature 1..23: note = Synthetic construct
  source 1..23: mol_type = other DNA
catccggatcccatgacaaggat

SEQ ID NO: 12481 - DNA, 23 bp, synthetic construct
  misc_feature 1..23: note = Synthetic construct
  source 1..23: mol_type = other DNA
atccggatcccatgacaaggatt

SEQ ID NO: 12482 - DNA, 23 bp, synthetic construct
  misc_feature 1..23: note = Synthetic construct
  source 1..23: mol_type = other DNA
tccggatcccatgacaaggattt

SEQ ID NO: 12483 - DNA, 23 bp, synthetic construct
  misc_feature 1..23: note = Synthetic construct
  source 1..23: mol_type = other DNA
ccggatcccatgacaaggatttg

SEQ ID NO: 12484 - DNA, 23 bp, synthetic construct
  misc_feature 1..23: note = Synthetic construct
  source 1..23: mol_type = other DNA
cggatcccatgacaaggatttgt

SEQ ID NO: 12485 - DNA, 23 bp, synthetic construct
  misc_feature 1..23: note = Synthetic construct
  source 1..23: mol_type = other DNA
ggatcccatgacaaggatttgtc

SEQ ID NO: 12486 - DNA, 23 bp, synthetic construct
  misc_feature 1..23: note = Synthetic construct
  source 1..23: mol_type = other DNA
gatcccatgacaaggatttgtca

SEQ ID NO: 12487 - DNA, 23 bp, synthetic construct
  misc_feature 1..23: note = Synthetic construct
  source 1..23: mol_type = other DNA
atcccatgacaaggatttgtcat

SEQ ID NO: 12488 - DNA, 23 bp, synthetic construct
  misc_feature 1..23: note = Synthetic construct
  source 1..23: mol_type = other DNA
tcccatgacaaggatttgtcatg

SEQ ID NO: 12489 - DNA, 23 bp, synthetic construct
  misc_feature 1..23: note = Synthetic construct
  source 1..23: mol_type = other DNA
cccatgacaaggatttgtcatgt

SEQ ID NO: 12490 - DNA, 23 bp, synthetic construct
  misc_feature 1..23: note = Synthetic construct
  source 1..23: mol_type = other DNA
ccatgacaaggatttgtcatgta

SEQ ID NO: 12491 - DNA, 23 bp, synthetic construct
  misc_feature 1..23: note = Synthetic construct
  source 1..23: mol_type = other DNA
catgacaaggatttgtcatgtaa

SEQ ID NO: 12492 - DNA, 23 bp, synthetic construct
  misc_feature 1..23: note = Synthetic construct
  source 1..23: mol_type = other DNA
atgacaaggatttgtcatgtaag

SEQ ID NO: 12493 - DNA, 23 bp, synthetic construct
  misc_feature 1..23: note = Synthetic construct
  source 1..23: mol_type = other DNA
tgacaaggatttgtcatgtaaga

SEQ ID NO: 12494 - DNA, 23 bp, synthetic construct
  misc_feature 1..23: note = Synthetic construct
  source 1..23: mol_type = other DNA
gacaaggatttgtcatgtaagaa

SEQ ID NO: 12495 - DNA, 23 bp, synthetic construct
  misc_feature 1..23: note = Synthetic construct
  source 1..23: mol_type = other DNA
acaaggatttgtcatgtaagaaa

SEQ ID NO: 12496 - DNA, 23 bp, synthetic construct
  misc_feature 1..23: note = Synthetic construct
  source 1..23: mol_type = other DNA
caaggatttgtcatgtaagaaac

SEQ ID NO: 12497 - DNA, 23 bp, synthetic construct
  misc_feature 1..23: note = Synthetic construct
  source 1..23: mol_type = other DNA
aaggatttgtcatgtaagaaacc

SEQ ID NO: 12498 - DNA, 23 bp, synthetic construct
  misc_feature 1..23: note = Synthetic construct
  source 1..23: mol_type = other DNA
aggatttgtcatgtaagaaacct

SEQ ID NO: 12499 - DNA, 23 bp, synthetic construct
  misc_feature 1..23: note = Synthetic construct
  source 1..23: mol_type = other DNA
ggatttgtcatgtaagaaacctt

SEQ ID NO: 12500 - DNA, 23 bp, synthetic construct
  misc_feature 1..23: note = Synthetic construct
  source 1..23: mol_type = other DNA
gatttgtcatgtaagaaaccttc

SEQ ID NO: 12501 - DNA, 23 bp, synthetic construct
  misc_feature 1..23: note = Synthetic construct
  source 1..23: mol_type = other DNA
atttgtcatgtaagaaaccttct

SEQ ID NO: 12502 - DNA, 23 bp, synthetic construct
  misc_feature 1..23: note = Synthetic construct
  source 1..23: mol_type = other DNA
tttgtcatgtaagaaaccttctc

SEQ ID NO: 12503 - DNA, 23 bp, synthetic construct
  misc_feature 1..23: note = Synthetic construct
  source 1..23: mol_type = other DNA
ttgtcatgtaagaaaccttctct

SEQ ID NO: 12504 - DNA, 23 bp, synthetic construct
  misc_feature 1..23: note = Synthetic construct
  source 1..23: mol_type = other DNA
tgtcatgtaagaaaccttctcta

SEQ ID NO: 12505 - DNA, 23 bp, synthetic construct
  misc_feature 1..23: note = Synthetic construct
  source 1..23: mol_type = other DNA
gtcatgtaagaaaccttctctat

SEQ ID NO: 12506 - DNA, 23 bp, synthetic construct
  misc_feature 1..23: note = Synthetic construct
  source 1..23: mol_type = other DNA
tcatgtaagaaaccttctctatt

SEQ ID NO: 12507 - DNA, 23 bp, synthetic construct
  misc_feature 1..23: note = Synthetic construct
  source 1..23: mol_type = other DNA
catgtaagaaaccttctctattt

SEQ ID NO: 12508 - DNA, 23 bp, synthetic construct
  misc_feature 1..23: note = Synthetic construct
  source 1..23: mol_type = other DNA
atgtaagaaaccttctctattta

SEQ ID NO: 12509 - DNA, 23 bp, synthetic construct
  misc_feature 1..23: note = Synthetic construct
  source 1..23: mol_type = other DNA
tgtaagaaaccttctctatttat

SEQ ID NO: 12510 - DNA, 23 bp, synthetic construct
  misc_feature 1..23: note = Synthetic construct
  source 1..23: mol_type = other DNA
gtaagaaaccttctctatttatc

SEQ ID NO: 12511 - DNA, 23 bp, synthetic construct
  misc_feature 1..23: note = Synthetic construct
  source 1..23: mol_type = other DNA
taagaaaccttctctatttatct

SEQ ID NO: 12512 - DNA, 23 bp, synthetic construct
  misc_feature 1..23: note = Synthetic construct
  source 1..23: mol_type = other DNA
aagaaaccttctctatttatctg

SEQ ID NO: 12513 - DNA, 23 bp, synthetic construct
  misc_feature 1..23: note = Synthetic construct
  source 1..23: mol_type = other DNA
agaaaccttctctatttatctga

SEQ ID NO: 12514 - DNA, 23 bp, synthetic construct
  misc_feature 1..23: note = Synthetic construct
  source 1..23: mol_type = other DNA
gaaaccttctctatttatctgac

SEQ ID NO: 12515 - DNA, 23 bp, synthetic construct
  misc_feature 1..23: note = Synthetic construct
  source 1..23: mol_type = other DNA
aaaccttctctatttatctgacc

SEQ ID NO: 12516 - DNA, 23 bp, synthetic construct
  misc_feature 1..23: note = Synthetic construct
  source 1..23: mol_type = other DNA
aaccttctctatttatctgaccg

SEQ ID NO: 12517 - DNA, 23 bp, synthetic construct
  misc_feature 1..23: note = Synthetic construct
  source 1..23: mol_type = other DNA
accttctctatttatctgaccgc

SEQ ID NO: 12518 - DNA, 23 bp, synthetic construct
  misc_feature 1..23: note = Synthetic construct
  source 1..23: mol_type = other DNA
ccttctctatttatctgaccgcg

SEQ ID NO: 12519 - DNA, 23 bp, synthetic construct
  misc_feature 1..23: note = Synthetic construct
  source 1..23: mol_type = other DNA
cttctctatttatctgaccgcga

SEQ ID NO: 12520 - DNA, 23 bp, synthetic construct
  misc_feature 1..23: note = Synthetic construct
  source 1..23: mol_type = other DNA
ttctctatttatctgaccgcgat

SEQ ID NO: 12521 - DNA, 23 bp, synthetic construct
  misc_feature 1..23: note = Synthetic construct
  source 1..23: mol_type = other DNA
tctctatttatctgaccgcgatc

SEQ ID NO: 12522 - DNA, 23 bp, synthetic construct
  misc_feature 1..23: note = Synthetic construct
  source 1..23: mol_type = other DNA
ctctatttatctgaccgcgatca

SEQ ID NO: 12523 - DNA, 23 bp, synthetic construct
  misc_feature 1..23: note = Synthetic construct
  source 1..23: mol_type = other DNA
tctatttatctgaccgcgatcac

SEQ ID NO: 12524 - DNA, 23 bp, synthetic construct
  misc_feature 1..23: note = Synthetic construct
  source 1..23: mol_type = other DNA
ctatttatctgaccgcgatcacc

SEQ ID NO: 12525 - DNA, 23 bp, synthetic construct
  misc_feature 1..23: note = Synthetic construct
  source 1..23: mol_type = other DNA
tatttatctgaccgcgatcacca

SEQ ID NO: 12526 - DNA, 23 bp, synthetic construct
  misc_feature 1..23: note = Synthetic construct
  source 1..23: mol_type = other DNA
atttatctgaccgcgatcaccat

SEQ ID NO: 12527 - DNA, 23 bp, synthetic construct
  misc_feature 1..23: note = Synthetic construct
  source 1..23: mol_type = other DNA
tttatctgaccgcgatcaccatt

SEQ ID NO: 12528 - DNA, 23 bp, synthetic construct
  misc_feature 1..23: note = Synthetic construct
  source 1..23: mol_type = other DNA
ttatctgaccgcgatcaccattc

SEQ ID NO: 12529 - DNA, 23 bp, synthetic construct
  misc_feature 1..23: note = Synthetic construct
  source 1..23: mol_type = other DNA
tatctgaccgcgatcaccattcg

SEQ ID NO: 12530 - DNA, 23 bp, synthetic construct
  misc_feature 1..23: note = Synthetic construct
  source 1..23: mol_type = other DNA
atctgaccgcgatcaccattcgc

SEQ ID NO: 12531 - DNA, 23 bp, synthetic construct
  misc_feature 1..23: note = Synthetic construct
  source 1..23: mol_type = other DNA
tctgaccgcgatcaccattcgcc

SEQ ID NO: 12532 - DNA, 23 bp, synthetic construct
  misc_feature 1..23: note = Synthetic construct
  source 1..23: mol_type = other DNA
ctgaccgcgatcaccattcgcct

SEQ ID NO: 12533 - DNA, 23 bp, synthetic construct
  misc_feature 1..23: note = Synthetic construct
  source 1..23: mol_type = other DNA
tgaccgcgatcaccattcgcctc

SEQ ID NO: 12534 - DNA, 23 bp, synthetic construct
  misc_feature 1..23: note = Synthetic construct
  source 1..23: mol_type = other DNA
gaccgcgatcaccattcgcctcc

SEQ ID NO: 12535 - DNA, 23 bp, synthetic construct
  misc_feature 1..23: note = Synthetic construct
  source 1..23: mol_type = other DNA
accgcgatcaccattcgcctccc

SEQ ID NO: 12536 - DNA, 23 bp, synthetic construct
  misc_feature 1..23: note = Synthetic construct
  source 1..23: mol_type = other DNA
ccgcgatcaccattcgcctcccg

SEQ ID NO: 12537 - DNA, 23 bp, synthetic construct
  misc_feature 1..23: note = Synthetic construct
  source 1..23: mol_type = other DNA
cgcgatcaccattcgcctcccgt

SEQ ID NO: 12538 - DNA, 23 bp, synthetic construct
  misc_feature 1..23: note = Synthetic construct
  source 1..23: mol_type = other DNA
gcgatcaccattcgcctcccgta

SEQ ID NO: 12539 - DNA, 23 bp, synthetic construct
  misc_feature 1..23: note = Synthetic construct
  source 1..23: mol_type = other DNA
cgatcaccattcgcctcccgtag

SEQ ID NO: 12540 - DNA, 23 bp, synthetic construct
  misc_feature 1..23: note = Synthetic construct
  source 1..23: mol_type = other DNA
gatcaccattcgcctcccgtagc

SEQ ID NO: 12541 - DNA, 23 bp, synthetic construct
  misc_feature 1..23: note = Synthetic construct
  source 1..23: mol_type = other DNA
atcaccattcgcctcccgtagct

SEQ ID NO: 12542 - DNA, 23 bp, synthetic construct
  misc_feature 1..23: note = Synthetic construct
  source 1..23: mol_type = other DNA
tcaccattcgcctcccgtagctt

SEQ ID NO: 12543 - DNA, 23 bp, synthetic construct
  misc_feature 1..23: note = Synthetic construct
  source 1..23: mol_type = other DNA
caccattcgcctcccgtagctta

SEQ ID NO: 12544 - DNA, 23 bp, synthetic construct
  misc_feature 1..23: note = Synthetic construct
  source 1..23: mol_type = other DNA
accattcgcctcccgtagcttag

SEQ ID NO: 12545 - DNA, 23 bp, synthetic construct
  misc_feature 1..23: note = Synthetic construct
  source 1..23: mol_type = other DNA
ccattcgcctcccgtagcttagc

SEQ ID NO: 12546 - DNA, 23 bp, synthetic construct
  misc_feature 1..23: note = Synthetic construct
  source 1..23: mol_type = other DNA
cattcgcctcccgtagcttagcg

SEQ ID NO: 12547 - DNA, 23 bp, synthetic construct
  misc_feature 1..23: note = Synthetic construct
  source 1..23: mol_type = other DNA
attcgcctcccgtagcttagcga

SEQ ID NO: 12548 - DNA, 23 bp, synthetic construct
  misc_feature 1..23: note = Synthetic construct
  source 1..23: mol_type = other DNA
ttcgcctcccgtagcttagcgat

SEQ ID NO: 12549 - DNA, 23 bp, synthetic construct
  misc_feature 1..23: note = Synthetic construct
  source 1..23: mol_type = other DNA
tcgcctcccgtagcttagcgata

SEQ ID NO: 12550 - DNA, 23 bp, synthetic construct
  misc_feature 1..23: note = Synthetic construct
  source 1..23: mol_type = other DNA
cgcctcccgtagcttagcgatag

SEQ ID NO: 12551 - DNA, 23 bp, synthetic construct
  misc_feature 1..23: note = Synthetic construct
  source 1..23: mol_type = other DNA
gcctcccgtagcttagcgatagc

SEQ ID NO: 12552 - DNA, 23 bp, synthetic construct
  misc_feature 1..23: note = Synthetic construct
  source 1..23: mol_type = other DNA
cctcccgtagcttagcgatagct

SEQ ID NO: 12553 - DNA, 23 bp, synthetic construct
  misc_feature 1..23: note = Synthetic construct
  source 1..23: mol_type = other DNA
ctcccgtagcttagcgatagcta

SEQ ID NO: 12554 - DNA, 23 bp, synthetic construct
  misc_feature 1..23: note = Synthetic construct
  source 1..23: mol_type = other DNA
tcccgtagcttagcgatagctaa

SEQ ID NO: 12555 - DNA, 23 bp, synthetic construct
  misc_feature 1..23: note = Synthetic construct
  source 1..23: mol_type = other DNA
cccgtagcttagcgatagctaag

SEQ ID NO: 12556 - DNA, 23 bp, synthetic construct
  misc_feature 1..23: note = Synthetic construct
  source 1..23: mol_type = other DNA
ccgtagcttagcgatagctaagg

SEQ ID NO: 12557 - DNA, 23 bp, synthetic construct
  misc_feature 1..23: note = Synthetic construct
  source 1..23: mol_type = other DNA
cgtagcttagcgatagctaaggt

SEQ ID NO: 12558 - DNA, 23 bp, synthetic construct
  misc_feature 1..23: note = Synthetic construct
  source 1..23: mol_type = other DNA
gtagcttagcgatagctaaggta

SEQ ID NO: 12559 - DNA, 23 bp, synthetic construct
  misc_feature 1..23: note = Synthetic construct
  source 1..23: mol_type = other DNA
tagcttagcgatagctaaggtac

SEQ ID NO: 12560 - DNA, 23 bp, synthetic construct
  misc_feature 1..23: note = Synthetic construct
  source 1..23: mol_type = other DNA
agcttagcgatagctaaggtacg

SEQ ID NO: 12561 - DNA, 23 bp, synthetic construct
  misc_feature 1..23: note = Synthetic construct
  source 1..23: mol_type = other DNA
gcttagcgatagctaaggtacga

SEQ ID NO: 12562 - DNA, 23 bp, synthetic construct
  misc_feature 1..23: note = Synthetic construct
  source 1..23: mol_type = other DNA
cttagcgatagctaaggtacgac

SEQ ID NO: 12563 - DNA, 23 bp, synthetic construct
  misc_feature 1..23: note = Synthetic construct
  source 1..23: mol_type = other DNA
ttagcgatagctaaggtacgacg

SEQ ID NO: 12564 - DNA, 23 bp, synthetic construct
  misc_feature 1..23: note = Synthetic construct
  source 1..23: mol_type = other DNA
tagcgatagctaaggtacgacgg

SEQ ID NO: 12565 - DNA, 23 bp, synthetic construct
  misc_feature 1..23: note = Synthetic construct
  source 1..23: mol_type = other DNA
agcgatagctaaggtacgacggg

SEQ ID NO: 12566 - DNA, 23 bp, synthetic construct
  misc_feature 1..23: note = Synthetic construct
  source 1..23: mol_type = other DNA
gcgatagctaaggtacgacgggt

SEQ ID NO: 12567 - DNA, 23 bp, synthetic construct
  misc_feature 1..23: note = Synthetic construct
  source 1..23: mol_type = other DNA
cgatagctaaggtacgacgggtc

SEQ ID NO: 12568 - DNA, 23 bp, synthetic construct
  misc_feature 1..23: note = Synthetic construct
  source 1..23: mol_type = other DNA
gatagctaaggtacgacgggtcg

SEQ ID NO: 12569 - DNA, 23 bp, synthetic construct
  misc_feature 1..23: note = Synthetic construct
  source 1..23: mol_type = other DNA
atagctaaggtacgacgggtcgc

SEQ ID NO: 12570 - DNA, 23 bp, synthetic construct
  misc_feature 1..23: note = Synthetic construct
  source 1..23: mol_type = other DNA
tagctaaggtacgacgggtcgcc

SEQ ID NO: 12571 - DNA, 23 bp, synthetic construct
  misc_feature 1..23: note = Synthetic construct
  source 1..23: mol_type = other DNA
agctaaggtacgacgggtcgcct

SEQ ID NO: 12572 - DNA, 23 bp, synthetic construct
  misc_feature 1..23: note = Synthetic construct
  source 1..23: mol_type = other DNA
gctaaggtacgacgggtcgcctc

SEQ ID NO: 12573 - DNA, 23 bp, synthetic construct
  misc_feature 1..23: note = Synthetic construct
  source 1..23: mol_type = other DNA
ctaaggtacgacgggtcgcctcg

SEQ ID NO: 12574 - DNA, 23 bp, synthetic construct
  misc_feature 1..23: note = Synthetic construct
  source 1..23: mol_type = other DNA
taaggtacgacgggtcgcctcgt

SEQ ID NO: 12575 - DNA, 23 bp, synthetic construct
  misc_feature 1..23: note = Synthetic construct
  source 1..23: mol_type = other DNA
aaggtacgacgggtcgcctcgtc

SEQ ID NO: 12576 - DNA, 23 bp, synthetic construct
  misc_feature 1..23: note = Synthetic construct
  source 1..23: mol_type = other DNA
aggtacgacgggtcgcctcgtca

SEQ ID NO: 12577 - DNA, 23 bp, synthetic construct
  misc_feature 1..23: note = Synthetic construct
  source 1..23: mol_type = other DNA
ggtacgacgggtcgcctcgtcat

SEQ ID NO: 12578 - DNA, 23 bp, synthetic construct
  misc_feature 1..23: note = Synthetic construct
  source 1..23: mol_type = other DNA
gtacgacgggtcgcctcgtcatt

SEQ ID NO: 12579 - DNA, 23 bp, synthetic construct
  misc_feature 1..23: note = Synthetic construct
  source 1..23: mol_type = other DNA
tacgacgggtcgcctcgtcatta

SEQ ID NO: 12580 - DNA, 23 bp, synthetic construct
  misc_feature 1..23: note = Synthetic construct
  source 1..23: mol_type = other DNA
acgacgggtcgcctcgtcattac

SEQ ID NO: 12581 - DNA, 23 bp, synthetic construct
  misc_feature 1..23: note = Synthetic construct
  source 1..23: mol_type = other DNA
cgacgggtcgcctcgtcattacc

SEQ ID NO: 12582 - DNA, 23 bp, synthetic construct
  misc_feature 1..23: note = Synthetic construct
  source 1..23: mol_type = other DNA
gacgggtcgcctcgtcattacca

SEQ ID NO: 12583 - DNA, 23 bp, synthetic construct
  misc_feature 1..23: note = Synthetic construct
  source 1..23: mol_type = other DNA
acgggtcgcctcgtcattaccag

SEQ ID NO: 12584 - DNA, 23 bp, synthetic construct
  misc_feature 1..23: note = Synthetic construct
  source 1..23: mol_type = other DNA
cgggtcgcctcgtcattaccaga

SEQ ID NO: 12585 - DNA, 23 bp, synthetic construct
  misc_feature 1..23: note = Synthetic construct
  source 1..23: mol_type = other DNA
gggtcgcctcgtcattaccagaa

SEQ ID NO: 12586 - DNA, 23 bp, synthetic construct
  misc_feature 1..23: note = Synthetic construct
  source 1..23: mol_type = other DNA
ggtcgcctcgtcattaccagaac

SEQ ID NO: 12587 - DNA, 23 bp, synthetic construct
  misc_feature 1..23: note = Synthetic construct
  source 1..23: mol_type = other DNA
gtcgcctcgtcattaccagaacc

SEQ ID NO: 12588 - DNA, 23 bp, synthetic construct
  misc_feature 1..23: note = Synthetic construct
  source 1..23: mol_type = other DNA
tcgcctcgtcattaccagaacct

SEQ ID NO: 12589 - DNA, 23 bp, synthetic construct
  misc_feature 1..23: note = Synthetic construct
  source 1..23: mol_type = other DNA
cgcctcgtcattaccagaaccta

SEQ ID NO: 12590 - DNA, 23 bp, synthetic construct
  misc_feature 1..23: note = Synthetic construct
  source 1..23: mol_type = other DNA
gcctcgtcattaccagaacctaa

SEQ ID NO: 12591 - DNA, 23 bp, synthetic construct
  misc_feature 1..23: note = Synthetic construct
  source 1..23: mol_type = other DNA
cctcgtcattaccagaacctaag

SEQ ID NO: 12592 - DNA, 23 bp, synthetic construct
  misc_feature 1..23: note = Synthetic construct
  source 1..23: mol_type = other DNA
ctcgtcattaccagaacctaagg

SEQ ID NO: 12593 - DNA, 23 bp, synthetic construct
  misc_feature 1..23: note = Synthetic construct
  source 1..23: mol_type = other DNA
tcgtcattaccagaacctaaggt

SEQ ID NO: 12594 - DNA, 23 bp, synthetic construct
  misc_feature 1..23: note = Synthetic construct
  source 1..23: mol_type = other DNA
cgtcattaccagaacctaaggtc

SEQ ID NO: 12595 - DNA, 23 bp, synthetic construct
  misc_feature 1..23: note = Synthetic construct
  source 1..23: mol_type = other DNA
gtcattaccagaacctaaggtcg

SEQ ID NO: 12596 - DNA, 23 bp, synthetic construct
  misc_feature 1..23: note = Synthetic construct
  source 1..23: mol_type = other DNA
tcattaccagaacctaaggtcgg

SEQ ID NO: 12597 - DNA, 23 bp, synthetic construct
  misc_feature 1..23: note = Synthetic construct
  source 1..23: mol_type = other DNA
cattaccagaacctaaggtcgga

SEQ ID NO: 12598 - DNA, 23 bp, synthetic construct
  misc_feature 1..23: note = Synthetic construct
  source 1..23: mol_type = other DNA
attaccagaacctaaggtcggat

SEQ ID NO: 12599 - DNA, 23 bp, synthetic construct
  misc_feature 1..23: note = Synthetic construct
  source 1..23: mol_type = other DNA
ttaccagaacctaaggtcggatg

SEQ ID NO: 12600 - DNA, 23 bp, synthetic construct
  misc_feature 1..23: note = Synthetic construct
  source 1..23: mol_type = other DNA
taccagaacctaaggtcggatgc

SEQ ID NO: 12601 - DNA, 23 bp, synthetic construct
  misc_feature 1..23: note = Synthetic construct
  source 1..23: mol_type = other DNA
accagaacctaaggtcggatgct

SEQ ID NO: 12602 - DNA, 23 bp, synthetic construct
  misc_feature 1..23: note = Synthetic construct
  source 1..23: mol_type = other DNA
ccagaacctaaggtcggatgctt

SEQ ID NO: 12603 - DNA, 23 bp, synthetic construct
  misc_feature 1..23: note = Synthetic construct
  source 1..23: mol_type = other DNA
cagaacctaaggtcggatgcttt

SEQ ID NO: 12604 - DNA, 23 bp, synthetic construct
  misc_feature 1..23: note = Synthetic construct
  source 1..23: mol_type = other DNA
agaacctaaggtcggatgctttg

SEQ ID NO: 12605 - DNA, 23 bp, synthetic construct
  misc_feature 1..23: note = Synthetic construct
  source 1..23: mol_type = other DNA
gaacctaaggtcggatgctttgt

SEQ ID NO: 12606 - DNA, 23 bp, synthetic construct
  misc_feature 1..23: note = Synthetic construct
  source 1..23: mol_type = other DNA
aacctaaggtcggatgctttgtg

SEQ ID NO: 12607 - DNA, 23 bp, synthetic construct
  misc_feature 1..23: note = Synthetic construct
  source 1..23: mol_type = other DNA
acctaaggtcggatgctttgtga

SEQ ID NO: 12608 - DNA, 23 bp, synthetic construct
  misc_feature 1..23: note = Synthetic construct
  source 1..23: mol_type = other DNA
cctaaggtcggatgctttgtgag

SEQ ID NO: 12609 - DNA, 23 bp, synthetic construct
  misc_feature 1..23: note = Synthetic construct
  source 1..23: mol_type = other DNA
ctaaggtcggatgctttgtgagc

SEQ ID NO: 12610 - DNA, 23 bp, synthetic construct
  misc_feature 1..23: note = Synthetic construct
  source 1..23: mol_type = other DNA
taaggtcggatgctttgtgagca

SEQ ID NO: 12611 - DNA, 23 bp, synthetic construct
  misc_feature 1..23: note = Synthetic construct
  source 1..23: mol_type = other DNA
aaggtcggatgctttgtgagcaa

SEQ ID NO: 12612 - DNA, 23 bp, synthetic construct
  misc_feature 1..23: note = Synthetic construct
  source 1..23: mol_type = other DNA
aggtcggatgctttgtgagcaat

SEQ ID NO: 12613 - DNA, 23 bp, synthetic construct
  misc_feature 1..23: note = Synthetic construct
  source 1..23: mol_type = other DNA
ggtcggatgctttgtgagcaatt

SEQ ID NO: 12614 - DNA, 23 bp, synthetic construct
  misc_feature 1..23: note = Synthetic construct
  source 1..23: mol_type = other DNA
gtcggatgctttgtgagcaattc

SEQ ID NO: 12615 - DNA, 23 bp, synthetic construct
  misc_feature 1..23: note = Synthetic construct
  source 1..23: mol_type = other DNA
tcggatgctttgtgagcaattcg

SEQ ID NO: 12616 - DNA, 23 bp, synthetic construct
  misc_feature 1..23: note = Synthetic construct
  source 1..23: mol_type = other DNA
cggatgctttgtgagcaattcgt

SEQ ID NO: 12617 - DNA, 23 bp, synthetic construct
  misc_feature 1..23: note = Synthetic construct
  source 1..23: mol_type = other DNA
ggatgctttgtgagcaattcgtc

SEQ ID NO: 12618 - DNA, 23 bp, synthetic construct
  misc_feature 1..23: note = Synthetic construct
  source 1..23: mol_type = other DNA
gatgctttgtgagcaattcgtcc

SEQ ID NO: 12619 - DNA, 23 bp, synthetic construct
  misc_feature 1..23: note = Synthetic construct
  source 1..23: mol_type = other DNA
atgctttgtgagcaattcgtccc

SEQ ID NO: 12620 - DNA, 23 bp, synthetic construct
  misc_feature 1..23: note = Synthetic construct
  source 1..23: mol_type = other DNA
tgctttgtgagcaattcgtccct

SEQ ID NO: 12621 - DNA, 23 bp, synthetic construct
  misc_feature 1..23: note = Synthetic construct
  source 1..23: mol_type = other DNA
gctttgtgagcaattcgtccctt

SEQ ID NO: 12622 - DNA, 23 bp, synthetic construct
  misc_feature 1..23: note = Synthetic construct
  source 1..23: mol_type = other DNA
ctttgtgagcaattcgtccctta

SEQ ID NO: 12623 - DNA, 23 bp, synthetic construct
  misc_feature 1..23: note = Synthetic construct
  source 1..23: mol_type = other DNA
tttgtgagcaattcgtcccttaa

SEQ ID NO: 12624 - DNA, 23 bp, synthetic construct
  misc_feature 1..23: note = Synthetic construct
  source 1..23: mol_type = other DNA
ttgtgagcaattcgtcccttaag

SEQ ID NO: 12625 - DNA, 23 bp, synthetic construct
  misc_feature 1..23: note = Synthetic construct
  source 1..23: mol_type = other DNA
tgtgagcaattcgtcccttaagt

SEQ ID NO: 12626 - DNA, 23 bp, synthetic construct
  misc_feature 1..23: note = Synthetic construct
  source 1..23: mol_type = other DNA
gtgagcaattcgtcccttaagta

SEQ ID NO: 12627 - DNA, 23 bp, synthetic construct
  misc_feature 1..23: note = Synthetic construct
  source 1..23: mol_type = other DNA
tgagcaattcgtcccttaagtaa

SEQ ID NO: 12628 - DNA, 23 bp, synthetic construct
  misc_feature 1..23: note = Synthetic construct
  source 1..23: mol_type = other DNA
gagcaattcgtcccttaagtaag

SEQ ID NO: 12629 - DNA, 23 bp, synthetic construct
  misc_feature 1..23: note = Synthetic construct
  source 1..23: mol_type = other DNA
agcaattcgtcccttaagtaagc

SEQ ID NO: 12630 - DNA, 23 bp, synthetic construct
  misc_feature 1..23: note = Synthetic construct
  source 1..23: mol_type = other DNA
gcaattcgtcccttaagtaagca

SEQ ID NO: 12631 - DNA, 23 bp, synthetic construct
  misc_feature 1..23: note = Synthetic construct
  source 1..23: mol_type = other DNA
caattcgtcccttaagtaagcaa

SEQ ID NO: 12632 - DNA, 23 bp, synthetic construct
  misc_feature 1..23: note = Synthetic construct
  source 1..23: mol_type = other DNA
aattcgtcccttaagtaagcaat

SEQ ID NO: 12633 - DNA, 23 bp, synthetic construct
  misc_feature 1..23: note = Synthetic construct
  source 1..23: mol_type = other DNA
attcgtcccttaagtaagcaatt

SEQ ID NO: 12634 - DNA, 23 bp, synthetic construct
  misc_feature 1..23: note = Synthetic construct
  source 1..23: mol_type = other DNA
ttcgtcccttaagtaagcaattg

SEQ ID NO: 12635 - DNA, 23 bp, synthetic construct
  misc_feature 1..23: note = Synthetic construct
  source 1..23: mol_type = other DNA
tcgtcccttaagtaagcaattgc

SEQ ID NO: 12636 - DNA, 23 bp, synthetic construct
  misc_feature 1..23: note = Synthetic construct
  source 1..23: mol_type = other DNA
cgtcccttaagtaagcaattgct

SEQ ID NO: 12637 - DNA, 23 bp, synthetic construct
  misc_feature 1..23: note = Synthetic construct
  source 1..23: mol_type = other DNA
gtcccttaagtaagcaattgctg

SEQ ID NO: 12638 - DNA, 23 bp, synthetic construct
  misc_feature 1..23: note = Synthetic construct
  source 1..23: mol_type = other DNA
tcccttaagtaagcaattgctgt

SEQ ID NO: 12639 - DNA, 23 bp, synthetic construct
  misc_feature 1..23: note = Synthetic construct
  source 1..23: mol_type = other DNA
cccttaagtaagcaattgctgta

SEQ ID NO: 12640 - DNA, 23 bp, synthetic construct
  misc_feature 1..23: note = Synthetic construct
  source 1..23: mol_type = other DNA
ccttaagtaagcaattgctgtaa

SEQ ID NO: 12641 - DNA, 23 bp, synthetic construct
  misc_feature 1..23: note = Synthetic construct
  source 1..23: mol_type = other DNA
cttaagtaagcaattgctgtaaa

SEQ ID NO: 12642 - DNA, 23 bp, synthetic construct
  misc_feature 1..23: note = Synthetic construct
  source 1..23: mol_type = other DNA
ttaagtaagcaattgctgtaaag

SEQ ID NO: 12643 - DNA, 23 bp, synthetic construct
  misc_feature 1..23: note = Synthetic construct
  source 1..23: mol_type = other DNA
taagtaagcaattgctgtaaagt

SEQ ID NO: 12644 - DNA, 23 bp, synthetic construct
  misc_feature 1..23: note = Synthetic construct
  source 1..23: mol_type = other DNA
aagtaagcaattgctgtaaagtc

SEQ ID NO: 12645 - DNA, 23 bp, synthetic construct
  misc_feature 1..23: note = Synthetic construct
  source 1..23: mol_type = other DNA
agtaagcaattgctgtaaagtcg

SEQ ID NO: 12646 - DNA, 23 bp, synthetic construct
  misc_feature 1..23: note = Synthetic construct
  source 1..23: mol_type = other DNA
gtaagcaattgctgtaaagtcgt

SEQ ID NO: 12647 - DNA, 23 bp, synthetic construct
  misc_feature 1..23: note = Synthetic construct
  source 1..23: mol_type = other DNA
taagcaattgctgtaaagtcgtc

SEQ ID NO: 12648 - DNA, 23 bp, synthetic construct
  misc_feature 1..23: note = Synthetic construct
  source 1..23: mol_type = other DNA
aagcaattgctgtaaagtcgtca

SEQ ID NO: 12649 - DNA, 23 bp, synthetic construct
  misc_feature 1..23: note = Synthetic construct
  source 1..23: mol_type = other DNA
agcaattgctgtaaagtcgtcac

SEQ ID NO: 12650 - DNA, 23 bp, synthetic construct
  misc_feature 1..23: note = Synthetic construct
  source 1..23: mol_type = other DNA
gcaattgctgtaaagtcgtcact

SEQ ID NO: 12651 - DNA, 23 bp, synthetic construct
  misc_feature 1..23: note = Synthetic construct
  source 1..23: mol_type = other DNA
caattgctgtaaagtcgtcactg

SEQ ID NO: 12652 - DNA, 23 bp, synthetic construct
  misc_feature 1..23: note = Synthetic construct
  source 1..23: mol_type = other DNA
aattgctgtaaagtcgtcactgt

SEQ ID NO: 12653 - DNA, 23 bp, synthetic construct
  misc_feature 1..23: note = Synthetic construct
  source 1..23: mol_type = other DNA
attgctgtaaagtcgtcactgtg

SEQ ID NO: 12654 - DNA, 23 bp, synthetic construct
  misc_feature 1..23: note = Synthetic construct
  source 1..23: mol_type = other DNA
ttgctgtaaagtcgtcactgtgc

SEQ ID NO: 12655 - DNA, 23 bp, synthetic construct
  misc_feature 1..23: note = Synthetic construct
  source 1..23: mol_type = other DNA
tgctgtaaagtcgtcactgtgcg

SEQ ID NO: 12656 - DNA, 23 bp, synthetic construct
  misc_feature 1..23: note = Synthetic construct
  source 1..23: mol_type = other DNA
gctgtaaagtcgtcactgtgcgg

SEQ ID NO: 12657 - DNA, 23 bp, synthetic construct
  misc_feature 1..23: note = Synthetic construct
  source 1..23: mol_type = other DNA
ctgtaaagtcgtcactgtgcgga

SEQ ID NO: 12658 - DNA, 23 bp, synthetic construct
  misc_feature 1..23: note = Synthetic construct
  source 1..23: mol_type = other DNA
tgtaaagtcgtcactgtgcggat

SEQ ID NO: 12659 - DNA, 23 bp, synthetic construct
  misc_feature 1..23: note = Synthetic construct
  source 1..23: mol_type = other DNA
gtaaagtcgtcactgtgcggatc

SEQ ID NO: 12660 - DNA, 23 bp, synthetic construct
  misc_feature 1..23: note = Synthetic construct
  source 1..23: mol_type = other DNA
taaagtcgtcactgtgcggatca

SEQ ID NO: 12661 - DNA, 23 bp, synthetic construct
  misc_feature 1..23: note = Synthetic construct
  source 1..23: mol_type = other DNA
aaagtcgtcactgtgcggatcac

SEQ ID NO: 12662 - DNA, 23 bp, synthetic construct
  misc_feature 1..23: note = Synthetic construct
  source 1..23: mol_type = other DNA
aagtcgtcactgtgcggatcacc

SEQ ID NO: 12663 - DNA, 23 bp, synthetic construct
  misc_feature 1..23: note = Synthetic construct
  source 1..23: mol_type = other DNA
agtcgtcactgtgcggatcaccg

SEQ ID NO: 12664 - DNA, 23 bp, synthetic construct
  misc_feature 1..23: note = Synthetic construct
  source 1..23: mol_type = other DNA
gtcgtcactgtgcggatcaccgc

SEQ ID NO: 12665 - DNA, 23 bp, synthetic construct
  misc_feature 1..23: note = Synthetic construct
  source 1..23: mol_type = other DNA
tcgtcactgtgcggatcaccgct

SEQ ID NO: 12666 - DNA, 23 bp, synthetic construct
  misc_feature 1..23: note = Synthetic construct
  source 1..23: mol_type = other DNA
cgtcactgtgcggatcaccgctt

SEQ ID NO: 12667 - DNA, 23 bp, synthetic construct
  misc_feature 1..23: note = Synthetic construct
  source 1..23: mol_type = other DNA
gtcactgtgcggatcaccgcttc

SEQ ID NO: 12668 - DNA, 23 bp, synthetic construct
  misc_feature 1..23: note = Synthetic construct
  source 1..23: mol_type = other DNA
tcactgtgcggatcaccgcttcc

SEQ ID NO: 12669 - DNA, 23 bp, synthetic construct
  misc_feature 1..23: note = Synthetic construct
  source 1..23: mol_type = other DNA
cactgtgcggatcaccgcttcca

SEQ ID NO: 12670 - DNA, 23 bp, synthetic construct
  misc_feature 1..23: note = Synthetic construct
  source 1..23: mol_type = other DNA
actgtgcggatcaccgcttccag

SEQ ID NO: 12671 - DNA, 23 bp, synthetic construct
  misc_feature 1..23: note = Synthetic construct
  source 1..23: mol_type = other DNA
ctgtgcggatcaccgcttccagt

SEQ ID NO: 12672 - DNA, 23 bp, synthetic construct
  misc_feature 1..23: note = Synthetic construct
  source 1..23: mol_type = other DNA
tgtgcggatcaccgcttccagta

SEQ ID NO: 12673 - DNA, 23 bp, synthetic construct
  misc_feature 1..23: note = Synthetic construct
  source 1..23: mol_type = other DNA
gtgcggatcaccgcttccagtag

SEQ ID NO: 12674 - DNA, 23 bp, synthetic construct
  misc_feature 1..23: note = Synthetic construct
  source 1..23: mol_type = other DNA
tgcggatcaccgcttccagtagc

SEQ ID NO: 12675 - DNA, 23 bp, synthetic construct
  misc_feature 1..23: note = Synthetic construct
  source 1..23: mol_type = other DNA
gcggatcaccgcttccagtagcg

SEQ ID NO: 12676 - DNA, 23 bp, synthetic construct
  misc_feature 1..23: note = Synthetic construct
  source 1..23: mol_type = other DNA
cggatcaccgcttccagtagcga

SEQ ID NO: 12677 - DNA, 23 bp, synthetic construct
  misc_feature 1..23: note = Synthetic construct
  source 1..23: mol_type = other DNA
ggatcaccgcttccagtagcgac

SEQ ID NO: 12678 - DNA, 23 bp, synthetic construct
  misc_feature 1..23: note = Synthetic construct
  source 1..23: mol_type = other DNA
gatcaccgcttccagtagcgaca

SEQ ID NO: 12679 - DNA, 23 bp, synthetic construct
  misc_feature 1..23: note = Synthetic construct
  source 1..23: mol_type = other DNA
atcaccgcttccagtagcgacag

SEQ ID NO: 12680 - DNA, 23 bp, synthetic construct
  misc_feature 1..23: note = Synthetic construct
  source 1..23: mol_type = other DNA
tcaccgcttccagtagcgacaga

SEQ ID NO: 12681 - DNA, 23 bp, synthetic construct
  misc_feature 1..23: note = Synthetic construct
  source 1..23: mol_type = other DNA
caccgcttccagtagcgacagaa

SEQ ID NO: 12682 - DNA, 23 bp, synthetic construct
  misc_feature 1..23: note = Synthetic construct
  source 1..23: mol_type = other DNA
accgcttccagtagcgacagaag

SEQ ID NO: 12683 - DNA, 23 bp, synthetic construct
  misc_feature 1..23: note = Synthetic construct
  source 1..23: mol_type = other DNA
ccgcttccagtagcgacagaagc

SEQ ID NO: 12684 - DNA, 23 bp, synthetic construct
  misc_feature 1..23: note = Synthetic construct
  source 1..23: mol_type = other DNA
cgcttccagtagcgacagaagca

SEQ ID NO: 12685 - DNA, 23 bp, synthetic construct
  misc_feature 1..23: note = Synthetic construct
  source 1..23: mol_type = other DNA
gcttccagtagcgacagaagcaa

SEQ ID NO: 12686 - DNA, 23 bp, synthetic construct
  misc_feature 1..23: note = Synthetic construct
  source 1..23: mol_type = other DNA
cttccagtagcgacagaagcaat

SEQ ID NO: 12687 - DNA, 23 bp, synthetic construct
  misc_feature 1..23: note = Synthetic construct
  source 1..23: mol_type = other DNA
ttccagtagcgacagaagcaatt

SEQ ID NO: 12688 - DNA, 23 bp, synthetic construct
  misc_feature 1..23: note = Synthetic construct
  source 1..23: mol_type = other DNA
tccagtagcgacagaagcaattg

SEQ ID NO: 12689 - DNA, 23 bp, synthetic construct
  misc_feature 1..23: note = Synthetic construct
  source 1..23: mol_type = other DNA
ccagtagcgacagaagcaattga

SEQ ID NO: 12690 - DNA, 23 bp, synthetic construct
  misc_feature 1..23: note = Synthetic construct
  source 1..23: mol_type = other DNA
cagtagcgacagaagcaattgat

SEQ ID NO: 12691 - DNA, 23 bp, synthetic construct
  misc_feature 1..23: note = Synthetic construct
  source 1..23: mol_type = other DNA
agtagcgacagaagcaattgatt

SEQ ID NO: 12692 - DNA, 23 bp, synthetic construct
  misc_feature 1..23: note = Synthetic construct
  source 1..23: mol_type = other DNA
gtagcgacagaagcaattgattg

SEQ ID NO: 12693 - DNA, 23 bp, synthetic construct
  misc_feature 1..23: note = Synthetic construct
  source 1..23: mol_type = other DNA
tagcgacagaagcaattgattgg

SEQ ID NO: 12694 - DNA, 23 bp, synthetic construct
  misc_feature 1..23: note = Synthetic construct
  source 1..23: mol_type = other DNA
agcgacagaagcaattgattggt

SEQ ID NO: 12695 - DNA, 23 bp, synthetic construct
  misc_feature 1..23: note = Synthetic construct
  source 1..23: mol_type = other DNA
gcgacagaagcaattgattggta

SEQ ID NO: 12696 - DNA, 23 bp, synthetic construct
  misc_feature 1..23: note = Synthetic construct
  source 1..23: mol_type = other DNA
cgacagaagcaattgattggtaa

SEQ ID NO: 12697 - DNA, 23 bp, synthetic construct
  misc_feature 1..23: note = Synthetic construct
  source 1..23: mol_type = other DNA
gacagaagcaattgattggtaaa

SEQ ID NO: 12698 - DNA, 23 bp, synthetic construct
  misc_feature 1..23: note = Synthetic construct
  source 1..23: mol_type = other DNA
acagaagcaattgattggtaaat

SEQ ID NO: 12699 - DNA, 23 bp, synthetic construct
  misc_feature 1..23: note = Synthetic construct
  source 1..23: mol_type = other DNA
cagaagcaattgattggtaaatt

SEQ ID NO: 12700 - DNA, 23 bp, synthetic construct
  misc_feature 1..23: note = Synthetic construct
  source 1..23: mol_type = other DNA
agaagcaattgattggtaaattt

SEQ ID NO: 12701 - DNA, 23 bp, synthetic construct
  misc_feature 1..23: note = Synthetic construct
  source 1..23: mol_type = other DNA
gaagcaattgattggtaaatttc

SEQ ID NO: 12702 - DNA, 23 bp, synthetic construct
  misc_feature 1..23: note = Synthetic construct
  source 1..23: mol_type = other DNA
aagcaattgattggtaaatttcg

SEQ ID NO: 12703 - DNA, 23 bp, synthetic construct
  misc_feature 1..23: note = Synthetic construct
  source 1..23: mol_type = other DNA
agcaattgattggtaaatttcga

SEQ ID NO: 12704 - DNA, 23 bp, synthetic construct
  misc_feature 1..23: note = Synthetic construct
  source 1..23: mol_type = other DNA
gcaattgattggtaaatttcgag

SEQ ID NO: 12705 - DNA, 23 bp, synthetic construct
  misc_feature 1..23: note = Synthetic construct
  source 1..23: mol_type = other DNA
caattgattggtaaatttcgaga

SEQ ID NO: 12706 - DNA, 23 bp, synthetic construct
  misc_feature 1..23: note = Synthetic construct
  source 1..23: mol_type = other DNA
aattgattggtaaatttcgagag

SEQ ID NO: 12707 - DNA, 23 bp, synthetic construct
  misc_feature 1..23: note = Synthetic construct
  source 1..23: mol_type = other DNA
attgattggtaaatttcgagaga

SEQ ID NO: 12708 - DNA, 23 bp, synthetic construct
  misc_feature 1..23: note = Synthetic construct
  source 1..23: mol_type = other DNA
ttgattggtaaatttcgagagaa

SEQ ID NO: 12709 - DNA, 23 bp, synthetic construct
  misc_feature 1..23: note = Synthetic construct
  source 1..23: mol_type = other DNA
tgattggtaaatttcgagagaaa

SEQ ID NO: 12710 - DNA, 23 bp, synthetic construct
  misc_feature 1..23: note = Synthetic construct
  source 1..23: mol_type = other DNA
gattggtaaatttcgagagaaag

SEQ ID NO: 12711 - DNA, 23 bp, synthetic construct
  misc_feature 1..23: note = Synthetic construct
  source 1..23: mol_type = other DNA
attggtaaatttcgagagaaaga

SEQ ID NO: 12712 - DNA, 23 bp, synthetic construct
  misc_feature 1..23: note = Synthetic construct
  source 1..23: mol_type = other DNA
ttggtaaatttcgagagaaagat

SEQ ID NO: 12713 - DNA, 23 bp, synthetic construct
  misc_feature 1..23: note = Synthetic construct
  source 1..23: mol_type = other DNA
tggtaaatttcgagagaaagatc

SEQ ID NO: 12714 - DNA, 23 bp, synthetic construct
  misc_feature 1..23: note = Synthetic construct
  source 1..23: mol_type = other DNA
ggtaaatttcgagagaaagatcg

SEQ ID NO: 12715 - DNA, 23 bp, synthetic construct
  misc_feature 1..23: note = Synthetic construct
  source 1..23: mol_type = other DNA
gtaaatttcgagagaaagatcgc

SEQ ID NO: 12716 - DNA, 23 bp, synthetic construct
  misc_feature 1..23: note = Synthetic construct
  source 1..23: mol_type = other DNA
taaatttcgagagaaagatcgcg

SEQ ID NO: 12717 - DNA, 23 bp, synthetic construct
  misc_feature 1..23: note = Synthetic construct
  source 1..23: mol_type = other DNA
aaatttcgagagaaagatcgcga

SEQ ID NO: 12718 - DNA, 23 bp, synthetic construct
  misc_feature 1..23: note = Synthetic construct
  source 1..23: mol_type = other DNA
aatttcgagagaaagatcgcgag

SEQ ID NO: 12719 - DNA, 23 bp, synthetic construct
  misc_feature 1..23: note = Synthetic construct
  source 1..23: mol_type = other DNA
atttcgagagaaagatcgcgagg

SEQ ID NO: 12720 - DNA, 23 bp, synthetic construct
  misc_feature 1..23: note = Synthetic construct
  source 1..23: mol_type = other DNA
tttcgagagaaagatcgcgagga

SEQ ID NO: 12721 - DNA, 23 bp, synthetic construct
  misc_feature 1..23: note = Synthetic construct
  source 1..23: mol_type = other DNA
ttcgagagaaagatcgcgaggaa

SEQ ID NO: 12722 - DNA, 23 bp, synthetic construct
  misc_feature 1..23: note = Synthetic construct
  source 1..23: mol_type = other DNA
tcgagagaaagatcgcgaggaag

SEQ ID NO: 12723 - DNA, 23 bp, synthetic construct
  misc_feature 1..23: note = Synthetic construct
  source 1..23: mol_type = other DNA
cgagagaaagatcgcgaggaaga

SEQ ID NO: 12724 - DNA, 23 bp, synthetic construct
  misc_feature 1..23: note = Synthetic construct
  source 1..23: mol_type = other DNA
gagagaaagatcgcgaggaagat

SEQ ID NO: 12725 - DNA, 23 bp, synthetic construct
  misc_feature 1..23: note = Synthetic construct
  source 1..23: mol_type = other DNA
agagaaagatcgcgaggaagatc

SEQ ID NO: 12726 - DNA, 23 bp, synthetic construct
  misc_feature 1..23: note = Synthetic construct
  source 1..23: mol_type = other DNA
gagaaagatcgcgaggaagatca

SEQ ID NO: 12727 - DNA, 23 bp, synthetic construct
  misc_feature 1..23: note = Synthetic construct
  source 1..23: mol_type = other DNA
agaaagatcgcgaggaagatcaa

SEQ ID NO: 12728 - DNA, 23 bp, synthetic construct
  misc_feature 1..23: note = Synthetic construct
  source 1..23: mol_type = other DNA
gaaagatcgcgaggaagatcaat

SEQ ID NO: 12729 - DNA, 23 bp, synthetic construct
  misc_feature 1..23: note = Synthetic construct
  source 1..23: mol_type = other DNA
aaagatcgcgaggaagatcaata

SEQ ID NO: 12730 - DNA, 23 bp, synthetic construct
  misc_feature 1..23: note = Synthetic construct
  source 1..23: mol_type = other DNA
aagatcgcgaggaagatcaatac

SEQ ID NO: 12731 - DNA, 23 bp, synthetic construct
  misc_feature 1..23: note = Synthetic construct
  source 1..23: mol_type = other DNA
agatcgcgaggaagatcaataca

SEQ ID NO: 12732 - DNA, 23 bp, synthetic construct
  misc_feature 1..23: note = Synthetic construct
  source 1..23: mol_type = other DNA
gatcgcgaggaagatcaatacat

SEQ ID NO: 12733 - DNA, 23 bp, synthetic construct
  misc_feature 1..23: note = Synthetic construct
  source 1..23: mol_type = other DNA
atcgcgaggaagatcaatacata

SEQ ID NO: 12734 - DNA, 23 bp, synthetic construct
  misc_feature 1..23: note = Synthetic construct
  source 1..23: mol_type = other DNA
tcgcgaggaagatcaatacataa

SEQ ID NO: 12735 - DNA, 23 bp, synthetic construct
  misc_feature 1..23: note = Synthetic construct
  source 1..23: mol_type = other DNA
cgcgaggaagatcaatacataaa

SEQ ID NO: 12736 - DNA, 23 bp, synthetic construct
  misc_feature 1..23: note = Synthetic construct
  source 1..23: mol_type = other DNA
gcgaggaagatcaatacataaag

SEQ ID NO: 12737 - DNA, 23 bp, synthetic construct
  misc_feature 1..23: note = Synthetic construct
  source 1..23: mol_type = other DNA
cgaggaagatcaatacataaaga

SEQ ID NO: 12738 - DNA, 23 bp, synthetic construct
  misc_feature 1..23: note = Synthetic construct
  source 1..23: mol_type = other DNA
gaggaagatcaatacataaagag

SEQ ID NO: 12739 - DNA, 23 bp, synthetic construct
  misc_feature 1..23: note = Synthetic construct
  source 1..23: mol_type = other DNA
aggaagatcaatacataaagagt

SEQ ID NO: 12740 - DNA, 23 bp, synthetic construct
  misc_feature 1..23: note = Synthetic construct
  source 1..23: mol_type = other DNA
ggaagatcaatacataaagagtt

SEQ ID NO: 12741 - DNA, 23 bp, synthetic construct
  misc_feature 1..23: note = Synthetic construct
  source 1..23: mol_type = other DNA
gaagatcaatacataaagagttg

SEQ ID NO: 12742 - DNA, 23 bp, synthetic construct
  misc_feature 1..23: note = Synthetic construct
  source 1..23: mol_type = other DNA
aagatcaatacataaagagttga

SEQ ID NO: 12743 - DNA, 23 bp, synthetic construct
  misc_feature 1..23: note = Synthetic construct
  source 1..23: mol_type = other DNA
agatcaatacataaagagttgaa

SEQ ID NO: 12744 - DNA, 23 bp, synthetic construct
  misc_feature 1..23: note = Synthetic construct
  source 1..23: mol_type = other DNA
gatcaatacataaagagttgaac

SEQ ID NO: 12745 - DNA, 23 bp, synthetic construct
  misc_feature 1..23: note = Synthetic construct
  source 1..23: mol_type = other DNA
atcaatacataaagagttgaact

SEQ ID NO: 12746 - DNA, 23 bp, synthetic construct
  misc_feature 1..23: note = Synthetic construct
  source 1..23: mol_type = other DNA
tcaatacataaagagttgaactt

SEQ ID NO: 12747 - DNA, 23 bp, synthetic construct
  misc_feature 1..23: note = Synthetic construct
  source 1..23: mol_type = other DNA
caatacataaagagttgaacttc

SEQ ID NO: 12748 - DNA, 23 bp, synthetic construct
  misc_feature 1..23: note = Synthetic construct
  source 1..23: mol_type = other DNA
aatacataaagagttgaacttct

SEQ ID NO: 12749 - DNA, 23 bp, synthetic construct
  misc_feature 1..23: note = Synthetic construct
  source 1..23: mol_type = other DNA
atacataaagagttgaacttctt

SEQ ID NO: 12750 - DNA, 23 bp, synthetic construct
  misc_feature 1..23: note = Synthetic construct
  source 1..23: mol_type = other DNA
tacataaagagttgaacttcttt

SEQ ID NO: 12751 - DNA, 23 bp, synthetic construct
  misc_feature 1..23: note = Synthetic construct
  source 1..23: mol_type = other DNA
acataaagagttgaacttctttg

SEQ ID NO: 12752 - DNA, 23 bp, synthetic construct
  misc_feature 1..23: note = Synthetic construct
  source 1..23: mol_type = other DNA
cataaagagttgaacttctttgt

SEQ ID NO: 12753 - DNA, 23 bp, synthetic construct
  misc_feature 1..23: note = Synthetic construct
  source 1..23: mol_type = other DNA
ataaagagttgaacttctttgtt

SEQ ID NO: 12754 - DNA, 23 bp, synthetic construct
  misc_feature 1..23: note = Synthetic construct
  source 1..23: mol_type = other DNA
taaagagttgaacttctttgttg

SEQ ID NO: 12755 - DNA, 23 bp, synthetic construct
  misc_feature 1..23: note = Synthetic construct
  source 1..23: mol_type = other DNA
aaagagttgaacttctttgttgt

SEQ ID NO: 12756 - DNA, 23 bp, synthetic construct
  misc_feature 1..23: note = Synthetic construct
  source 1..23: mol_type = other DNA
aagagttgaacttctttgttgtc

SEQ ID NO: 12757 - DNA, 23 bp, synthetic construct
  misc_feature 1..23: note = Synthetic construct
  source 1..23: mol_type = other DNA
agagttgaacttctttgttgtct

SEQ ID NO: 12758 - DNA, 23 bp, synthetic construct
  misc_feature 1..23: note = Synthetic construct
  source 1..23: mol_type = other DNA
gagttgaacttctttgttgtctt

SEQ ID NO: 12759 - DNA, 23 bp, synthetic construct
  misc_feature 1..23: note = Synthetic construct
  source 1..23: mol_type = other DNA
agttgaacttctttgttgtcttc

SEQ ID NO: 12760 - DNA, 23 bp, synthetic construct
  misc_feature 1..23: note = Synthetic construct
  source 1..23: mol_type = other DNA
gttgaacttctttgttgtcttcg

SEQ ID NO: 12761 - DNA, 23 bp, synthetic construct
  misc_feature 1..23: note = Synthetic construct
  source 1..23: mol_type = other DNA
ttgaacttctttgttgtcttcga

SEQ ID NO: 12762 - DNA, 23 bp, synthetic construct
  misc_feature 1..23: note = Synthetic construct
  source 1..23: mol_type = other DNA
tgaacttctttgttgtcttcgac

SEQ ID NO: 12763 - DNA, 23 bp, synthetic construct
  misc_feature 1..23: note = Synthetic construct
  source 1..23: mol_type = other DNA
gaacttctttgttgtcttcgaca

SEQ ID NO: 12764 - DNA, 23 bp, synthetic construct
  misc_feature 1..23: note = Synthetic construct
  source 1..23: mol_type = other DNA
aacttctttgttgtcttcgacat

SEQ ID NO: 12765 - DNA, 23 bp, synthetic construct
  misc_feature 1..23: note = Synthetic construct
  source 1..23: mol_type = other DNA
acttctttgttgtcttcgacatg

SEQ ID NO: 12766 - DNA, 23 bp, synthetic construct
  misc_feature 1..23: note = Synthetic construct
  source 1..23: mol_type = other DNA
cttctttgttgtcttcgacatgg

SEQ ID NO: 12767 - DNA, 23 bp, synthetic construct
  misc_feature 1..23: note = Synthetic construct
  source 1..23: mol_type = other DNA
ttctttgttgtcttcgacatggg

SEQ ID NO: 12768 - DNA, 23 bp, synthetic construct
  misc_feature 1..23: note = Synthetic construct
  source 1..23: mol_type = other DNA
tctttgttgtcttcgacatgggt

SEQ ID NO: 12769 - DNA, 23 bp, synthetic construct
  misc_feature 1..23: note = Synthetic construct
  source 1..23: mol_type = other DNA
ctttgttgtcttcgacatgggta

SEQ ID NO: 12770 - DNA, 23 bp, synthetic construct
  misc_feature 1..23: note = Synthetic construct
  source 1..23: mol_type = other DNA
tttgttgtcttcgacatgggtaa

SEQ ID NO: 12771 - DNA, 23 bp, synthetic construct
  misc_feature 1..23: note = Synthetic construct
  source 1..23: mol_type = other DNA
ttgttgtcttcgacatgggtaat

SEQ ID NO: 12772 - DNA, 23 bp, synthetic construct
  misc_feature 1..23: note = Synthetic construct
  source 1..23: mol_type = other DNA
tgttgtcttcgacatgggtaatc

SEQ ID NO: 12773 - DNA, 23 bp, synthetic construct
  misc_feature 1..23: note = Synthetic construct
  source 1..23: mol_type = other DNA
gttgtcttcgacatgggtaatcc

SEQ ID NO: 12774 - DNA, 23 bp, synthetic construct
  misc_feature 1..23: note = Synthetic construct
  source 1..23: mol_type = other DNA
ttgtcttcgacatgggtaatcct

SEQ ID NO: 12775 - DNA, 23 bp, synthetic construct
  misc_feature 1..23: note = Synthetic construct
  source 1..23: mol_type = other DNA
tgtcttcgacatgggtaatcctc

SEQ ID NO: 12776 - DNA, 23 bp, synthetic construct
  misc_feature 1..23: note = Synthetic construct
  source 1..23: mol_type = other DNA
gtcttcgacatgggtaatcctca

SEQ ID NO: 12777 - DNA, 23 bp, synthetic construct
  misc_feature 1..23: note = Synthetic construct
  source 1..23: mol_type = other DNA
tcttcgacatgggtaatcctcat

SEQ ID NO: 12778 - DNA, 23 bp, synthetic construct
  misc_feature 1..23: note = Synthetic construct
  source 1..23: mol_type = other DNA
cttcgacatgggtaatcctcatg

SEQ ID NO: 12779 - DNA, 23 bp, synthetic construct
  misc_feature 1..23: note = Synthetic construct
  source 1..23: mol_type = other DNA
ttcgacatgggtaatcctcatgt

SEQ ID NO: 12780 - DNA, 23 bp, synthetic construct
  misc_feature 1..23: note = Synthetic construct
  source 1..23: mol_type = other DNA
tcgacatgggtaatcctcatgtt

SEQ ID NO: 12781 - DNA, 23 bp, synthetic construct
  misc_feature 1..23: note = Synthetic construct
  source 1..23: mol_type = other DNA
cgacatgggtaatcctcatgttt

SEQ ID NO: 12782 - DNA, 23 bp, synthetic construct
  misc_feature 1..23: note = Synthetic construct
  source 1..23: mol_type = other DNA
gacatgggtaatcctcatgtttg

SEQ ID NO: 12783 - DNA, 23 bp, synthetic construct
  misc_feature 1..23: note = Synthetic construct
  source 1..23: mol_type = other DNA
acatgggtaatcctcatgtttga

SEQ ID NO: 12784 - DNA, 23 bp, synthetic construct
  misc_feature 1..23: note = Synthetic construct
  source 1..23: mol_type = other DNA
catgggtaatcctcatgtttgaa

SEQ ID NO: 12785 - DNA, 23 bp, synthetic construct
  misc_feature 1..23: note = Synthetic construct
  source 1..23: mol_type = other DNA
atgggtaatcctcatgtttgaat

SEQ ID NO: 12786 - DNA, 23 bp, synthetic construct
  misc_feature 1..23: note = Synthetic construct
  source 1..23: mol_type = other DNA
tgggtaatcctcatgtttgaatg

SEQ ID NO: 12787 - DNA, 23 bp, synthetic construct
  misc_feature 1..23: note = Synthetic construct
  source 1..23: mol_type = other DNA
gggtaatcctcatgtttgaatgg

SEQ ID NO: 12788 - DNA, 23 bp, synthetic construct
  misc_feature 1..23: note = Synthetic construct
  source 1..23: mol_type = other DNA
ggtaatcctcatgtttgaatggc

SEQ ID NO: 12789 - DNA, 23 bp, synthetic construct
  misc_feature 1..23: note = Synthetic construct
  source 1..23: mol_type = other DNA
gtaatcctcatgtttgaatggcc

SEQ ID NO: 12790 - DNA, 23 bp, synthetic construct
  misc_feature 1..23: note = Synthetic construct
  source 1..23: mol_type = other DNA
taatcctcatgtttgaatggccg

SEQ ID NO: 12791 - DNA, 23 bp, synthetic construct
  misc_feature 1..23: note = Synthetic construct
  source 1..23: mol_type = other DNA
aatcctcatgtttgaatggccgg

SEQ ID NO: 12792 - DNA, 23 bp, synthetic construct
  misc_feature 1..23: note = Synthetic construct
  source 1..23: mol_type = other DNA
atcctcatgtttgaatggccggc

SEQ ID NO: 12793 - DNA, 23 bp, synthetic construct
  misc_feature 1..23: note = Synthetic construct
  source 1..23: mol_type = other DNA
tcctcatgtttgaatggccggcg

SEQ ID NO: 12794 - DNA, 23 bp, synthetic construct
  misc_feature 1..23: note = Synthetic construct
  source 1..23: mol_type = other DNA
cctcatgtttgaatggccggcgt

SEQ ID NO: 12795 - DNA, 23 bp, synthetic construct
  misc_feature 1..23: note = Synthetic construct
  source 1..23: mol_type = other DNA
ctcatgtttgaatggccggcgtc

SEQ ID NO: 12796 - DNA, 23 bp, synthetic construct
  misc_feature 1..23: note = Synthetic construct
  source 1..23: mol_type = other DNA
tcatgtttgaatggccggcgtct

SEQ ID NO: 12797 - DNA, 23 bp, synthetic construct
  misc_feature 1..23: note = Synthetic construct
  source 1..23: mol_type = other DNA
catgtttgaatggccggcgtcta

SEQ ID NO: 12798 - DNA, 23 bp, synthetic construct
  misc_feature 1..23: note = Synthetic construct
  source 1..23: mol_type = other DNA
atgtttgaatggccggcgtctat

SEQ ID NO: 12799 - DNA, 23 bp, synthetic construct
  misc_feature 1..23: note = Synthetic construct
  source 1..23: mol_type = other DNA
tgtttgaatggccggcgtctatt

SEQ ID NO: 12800 - DNA, 23 bp, synthetic construct
  misc_feature 1..23: note = Synthetic construct
  source 1..23: mol_type = other DNA
gtttgaatggccggcgtctatta

SEQ ID NO: 12801 - DNA, 23 bp, synthetic construct
  misc_feature 1..23: note = Synthetic construct
  source 1..23: mol_type = other DNA
tttgaatggccggcgtctattag

SEQ ID NO: 12802 - DNA, 23 bp, synthetic construct
  misc_feature 1..23: note = Synthetic construct
  source 1..23: mol_type = other DNA
ttgaatggccggcgtctattagt

SEQ ID NO: 12803 - DNA, 23 bp, synthetic construct
  misc_feature 1..23: note = Synthetic construct
  source 1..23: mol_type = other DNA
tgaatggccggcgtctattagta

SEQ ID NO: 12804 - DNA, 23 bp, synthetic construct
  misc_feature 1..23: note = Synthetic construct
  source 1..23: mol_type = other DNA
gaatggccggcgtctattagtag

SEQ ID NO: 12805 - DNA, 23 bp, synthetic construct
  misc_feature 1..23: note = Synthetic construct
  source 1..23: mol_type = other DNA
aatggccggcgtctattagtaga

SEQ ID NO: 12806 - DNA, 23 bp, synthetic construct
  misc_feature 1..23: note = Synthetic construct
  source 1..23: mol_type = other DNA
atggccggcgtctattagtagat

SEQ ID NO: 12807 - DNA, 23 bp, synthetic construct
  misc_feature 1..23: note = Synthetic construct
  source 1..23: mol_type = other DNA
tggccggcgtctattagtagatg

SEQ ID NO: 12808 - DNA, 23 bp, synthetic construct
  misc_feature 1..23: note = Synthetic construct
  source 1..23: mol_type = other DNA
ggccggcgtctattagtagatgc

SEQ ID NO: 12809 - DNA, 23 bp, synthetic construct
  misc_feature 1..23: note = Synthetic construct
  source 1..23: mol_type = other DNA
gccggcgtctattagtagatgcc

SEQ ID NO: 12810 - DNA, 23 bp, synthetic construct
  misc_feature 1..23: note = Synthetic construct
  source 1..23: mol_type = other DNA
ccggcgtctattagtagatgccg

SEQ ID NO: 12811 - DNA, 23 bp, synthetic construct
  misc_feature 1..23: note = Synthetic construct
  source 1..23: mol_type = other DNA
cggcgtctattagtagatgccgg

SEQ ID NO: 12812 - DNA, 23 bp, synthetic construct
  misc_feature 1..23: note = Synthetic construct
  source 1..23: mol_type = other DNA
ggcgtctattagtagatgccgga

SEQ ID NO: 12813 - DNA, 23 bp, synthetic construct
  misc_feature 1..23: note = Synthetic construct
  source 1..23: mol_type = other DNA
gcgtctattagtagatgccggag

SEQ ID NO: 12814 - DNA, 23 bp, synthetic construct
  misc_feature 1..23: note = Synthetic construct
  source 1..23: mol_type = other DNA
cgtctattagtagatgccggagt

SEQ ID NO: 12815 - DNA, 23 bp, synthetic construct
  misc_feature 1..23: note = Synthetic construct
  source 1..23: mol_type = other DNA
gtctattagtagatgccggagtt

SEQ ID NO: 12816 - DNA, 23 bp, synthetic construct
  misc_feature 1..23: note = Synthetic construct
  source 1..23: mol_type = other DNA
tctattagtagatgccggagttt

SEQ ID NO: 12817 - DNA, 23 bp, synthetic construct
  misc_feature 1..23: note = Synthetic construct
  source 1..23: mol_type = other DNA
ctattagtagatgccggagtttg

SEQ ID NO: 12818 - DNA, 23 bp, synthetic construct
  misc_feature 1..23: note = Synthetic construct
  source 1..23: mol_type = other DNA
tattagtagatgccggagtttgc

SEQ ID NO: 12819 - DNA, 23 bp, synthetic construct
  misc_feature 1..23: note = Synthetic construct
  source 1..23: mol_type = other DNA
attagtagatgccggagtttgct

SEQ ID NO: 12820 - DNA, 23 bp, synthetic construct
  misc_feature 1..23: note = Synthetic construct
  source 1..23: mol_type = other DNA
ttagtagatgccggagtttgctg

SEQ ID NO: 12821 - DNA, 23 bp, synthetic construct
  misc_feature 1..23: note = Synthetic construct
  source 1..23: mol_type = other DNA
tagtagatgccggagtttgctgc

SEQ ID NO: 12822 - DNA, 23 bp, synthetic construct
  misc_feature 1..23: note = Synthetic construct
  source 1..23: mol_type = other DNA
agtagatgccggagtttgctgcg

SEQ ID NO: 12823 - DNA, 23 bp, synthetic construct
  misc_feature 1..23: note = Synthetic construct
  source 1..23: mol_type = other DNA
gtagatgccggagtttgctgcga

SEQ ID NO: 12824 - DNA, 23 bp, synthetic construct
  misc_feature 1..23: note = Synthetic construct
  source 1..23: mol_type = other DNA
tagatgccggagtttgctgcgat

SEQ ID NO: 12825 - DNA, 23 bp, synthetic construct
  misc_feature 1..23: note = Synthetic construct
  source 1..23: mol_type = other DNA
agatgccggagtttgctgcgatt

SEQ ID NO: 12826 - DNA, 23 bp, synthetic construct
  misc_feature 1..23: note = Synthetic construct
  source 1..23: mol_type = other DNA
gatgccggagtttgctgcgattg

SEQ ID NO: 12827 - DNA, 23 bp, synthetic construct
  misc_feature 1..23: note = Synthetic construct
  source 1..23: mol_type = other DNA
atgccggagtttgctgcgattgc

SEQ ID NO: 12828 - DNA, 23 bp, synthetic construct
  misc_feature 1..23: note = Synthetic construct
  source 1..23: mol_type = other DNA
tgccggagtttgctgcgattgct

SEQ ID NO: 12829 - DNA, 23 bp, synthetic construct
  misc_feature 1..23: note = Synthetic construct
  source 1..23: mol_type = other DNA
gccggagtttgctgcgattgctg

SEQ ID NO: 12830 - DNA, 23 bp, synthetic construct
  misc_feature 1..23: note = Synthetic construct
  source 1..23: mol_type = other DNA
ccggagtttgctgcgattgctga

SEQ ID NO: 12831 - DNA, 23 bp, synthetic construct
  misc_feature 1..23: note = Synthetic construct
  source 1..23: mol_type = other DNA
cggagtttgctgcgattgctgag

SEQ ID NO: 12832 - DNA, 23 bp, synthetic construct
  misc_feature 1..23: note = Synthetic construct
  source 1..23: mol_type = other DNA
ggagtttgctgcgattgctgagg

SEQ ID NO: 12833 - DNA, 23 bp, synthetic construct
  misc_feature 1..23: note = Synthetic construct
  source 1..23: mol_type = other DNA
gagtttgctgcgattgctgaggg

SEQ ID NO: 12834 - DNA, 23 bp, synthetic construct
  misc_feature 1..23: note = Synthetic construct
  source 1..23: mol_type = other DNA
agtttgctgcgattgctgaggga

SEQ ID NO: 12835 - DNA, 23 bp, synthetic construct
  misc_feature 1..23: note = Synthetic construct
  source 1..23: mol_type = other DNA
gtttgctgcgattgctgagggaa

SEQ ID NO: 12836 - DNA, 23 bp, synthetic construct
  misc_feature 1..23: note = Synthetic construct
  source 1..23: mol_type = other DNA
tttgctgcgattgctgagggaat

SEQ ID NO: 12837 - DNA, 23 bp, synthetic construct
  misc_feature 1..23: note = Synthetic construct
  source 1..23: mol_type = other DNA
ttgctgcgattgctgagggaatc

SEQ ID NO: 12838 - DNA, 23 bp, synthetic construct
  misc_feature 1..23: note = Synthetic construct
  source 1..23: mol_type = other DNA
tgctgcgattgctgagggaatcg

SEQ ID NO: 12839 - DNA, 23 bp, synthetic construct
  misc_feature 1..23: note = Synthetic construct
  source 1..23: mol_type = other DNA
gctgcgattgctgagggaatcgg

SEQ ID NO: 12840 - DNA, 23 bp, synthetic construct
  misc_feature 1..23: note = Synthetic construct
  source 1..23: mol_type = other DNA
ctgcgattgctgagggaatcggg

SEQ ID NO: 12841 - DNA, 23 bp, synthetic construct
  misc_feature 1..23: note = Synthetic construct
  source 1..23: mol_type = other DNA
tgcgattgctgagggaatcgggt

SEQ ID NO: 12842 - DNA, 23 bp, synthetic construct
  misc_feature 1..23: note = Synthetic construct
  source 1..23: mol_type = other DNA
gcgattgctgagggaatcgggtt

SEQ ID NO: 12843 - DNA, 23 bp, synthetic construct
  misc_feature 1..23: note = Synthetic construct
  source 1..23: mol_type = other DNA
cgattgctgagggaatcgggttt

SEQ ID NO: 12844 - DNA, 23 bp, synthetic construct
  misc_feature 1..23: note = Synthetic construct
  source 1..23: mol_type = other DNA
gattgctgagggaatcgggtttc

SEQ ID NO: 12845 - DNA, 23 bp, synthetic construct
  misc_feature 1..23: note = Synthetic construct
  source 1..23: mol_type = other DNA
attgctgagggaatcgggtttcc

SEQ ID NO: 12846 - DNA, 23 bp, synthetic construct
  misc_feature 1..23: note = Synthetic construct
  source 1..23: mol_type = other DNA
ttgctgagggaatcgggtttcca

SEQ ID NO: 12847 - DNA, 23 bp, synthetic construct
  misc_feature 1..23: note = Synthetic construct
  source 1..23: mol_type = other DNA
tgctgagggaatcgggtttccat

SEQ ID NO: 12848 - DNA, 23 bp, synthetic construct
  misc_feature 1..23: note = Synthetic construct
  source 1..23: mol_type = other DNA
gctgagggaatcgggtttccatc

SEQ ID NO: 12849 - DNA, 23 bp, synthetic construct
  misc_feature 1..23: note = Synthetic construct
  source 1..23: mol_type = other DNA
ctgagggaatcgggtttccatct

SEQ ID NO: 12850 - DNA, 23 bp, synthetic construct
  misc_feature 1..23: note = Synthetic construct
  source 1..23: mol_type = other DNA
tgagggaatcgggtttccatctt

SEQ ID NO: 12851 - DNA, 23 bp, synthetic construct
  misc_feature 1..23: note = Synthetic construct
  source 1..23: mol_type = other DNA
gagggaatcgggtttccatcttt

SEQ ID NO: 12852 - DNA, 23 bp, synthetic construct
  misc_feature 1..23: note = Synthetic construct
  source 1..23: mol_type = other DNA
agggaatcgggtttccatctttt

SEQ ID NO: 12853 - DNA, 23 bp, synthetic construct
  misc_feature 1..23: note = Synthetic construct
  source 1..23: mol_type = other DNA
gggaatcgggtttccatctttta

SEQ ID NO: 12854 - DNA, 23 bp, synthetic construct
  misc_feature 1..23: note = Synthetic construct
  source 1..23: mol_type = other DNA
ggaatcgggtttccatcttttag

SEQ ID NO: 12855 - DNA, 23 bp, synthetic construct
  misc_feature 1..23: note = Synthetic construct
  source 1..23: mol_type = other DNA
gaatcgggtttccatcttttagg

SEQ ID NO: 12856 - DNA, 23 bp, synthetic construct
  misc_feature 1..23: note = Synthetic construct
  source 1..23: mol_type = other DNA
aatcgggtttccatcttttagga

SEQ ID NO: 12857 - DNA, 23 bp, synthetic construct
  misc_feature 1..23: note = Synthetic construct
  source 1..23: mol_type = other DNA
atcgggtttccatcttttaggag

SEQ ID NO: 12858 - DNA, 23 bp, synthetic construct
  misc_feature 1..23: note = Synthetic construct
  source 1..23: mol_type = other DNA
tcgggtttccatcttttaggaga

SEQ ID NO: 12859 - DNA, 23 bp, synthetic construct
  misc_feature 1..23: note = Synthetic construct
  source 1..23: mol_type = other DNA
cgggtttccatcttttaggagac

SEQ ID NO: 12860 - DNA, 23 bp, synthetic construct
  misc_feature 1..23: note = Synthetic construct
  source 1..23: mol_type = other DNA
gggtttccatcttttaggagacc

SEQ ID NO: 12861 - DNA, 23 bp, synthetic construct
  misc_feature 1..23: note = Synthetic construct
  source 1..23: mol_type = other DNA
ggtttccatcttttaggagacct

SEQ ID NO: 12862 - DNA, 23 bp, synthetic construct
  misc_feature 1..23: note = Synthetic construct
  source 1..23: mol_type = other DNA
gtttccatcttttaggagacctt

SEQ ID NO: 12863 - DNA, 23 bp, synthetic construct
  misc_feature 1..23: note = Synthetic construct
  source 1..23: mol_type = other DNA
tttccatcttttaggagaccttg

SEQ ID NO: 12864 - DNA, 23 bp, synthetic construct
  misc_feature 1..23: note = Synthetic construct
  source 1..23: mol_type = other DNA
ttccatcttttaggagaccttgc

SEQ ID NO: 12865 - DNA, 23 bp, synthetic construct
  misc_feature 1..23: note = Synthetic construct
  source 1..23: mol_type = other DNA
tccatcttttaggagaccttgca

SEQ ID NO: 12866 - DNA, 23 bp, synthetic construct
  misc_feature 1..23: note = Synthetic construct
  source 1..23: mol_type = other DNA
ccatcttttaggagaccttgcat

SEQ ID NO: 12867 - DNA, 23 bp, synthetic construct
  misc_feature 1..23: note = Synthetic construct
  source 1..23: mol_type = other DNA
catcttttaggagaccttgcatt

SEQ ID NO: 12868 - DNA, 23 bp, synthetic construct
  misc_feature 1..23: note = Synthetic construct
  source 1..23: mol_type = other DNA
atcttttaggagaccttgcattg

SEQ ID NO: 12869 - DNA, 23 bp, synthetic construct
  misc_feature 1..23: note = Synthetic construct
  source 1..23: mol_type = other DNA
tcttttaggagaccttgcattgc

SEQ ID NO: 12870 - DNA, 23 bp, synthetic construct
  misc_feature 1..23: note = Synthetic construct
  source 1..23: mol_type = other DNA
cttttaggagaccttgcattgcc

SEQ ID NO: 12871 - DNA, 23 bp, synthetic construct
  misc_feature 1..23: note = Synthetic construct
  source 1..23: mol_type = other DNA
ttttaggagaccttgcattgcct

SEQ ID NO: 12872 - DNA, 23 bp, synthetic construct
  misc_feature 1..23: note = Synthetic construct
  source 1..23: mol_type = other DNA
tttaggagaccttgcattgcctt

SEQ ID NO: 12873 - DNA, 23 bp, synthetic construct
  misc_feature 1..23: note = Synthetic construct
  source 1..23: mol_type = other DNA
ttaggagaccttgcattgcctta

SEQ ID NO: 12874 - DNA, 23 bp, synthetic construct
  misc_feature 1..23: note = Synthetic construct
  source 1..23: mol_type = other DNA
taggagaccttgcattgccttaa

SEQ ID NO: 12875 - DNA, 23 bp, synthetic construct
  misc_feature 1..23: note = Synthetic construct
  source 1..23: mol_type = other DNA
aggagaccttgcattgccttaac

SEQ ID NO: 12876 - DNA, 23 bp, synthetic construct
  misc_feature 1..23: note = Synthetic construct
  source 1..23: mol_type = other DNA
ggagaccttgcattgccttaaca

SEQ ID NO: 12877 - DNA, 23 bp, synthetic construct
  misc_feature 1..23: note = Synthetic construct
  source 1..23: mol_type = other DNA
gagaccttgcattgccttaacaa

SEQ ID NO: 12878 - DNA, 23 bp, synthetic construct
  misc_feature 1..23: note = Synthetic construct
  source 1..23: mol_type = other DNA
agaccttgcattgccttaacaat

SEQ ID NO: 12879 - DNA, 23 bp, synthetic construct
  misc_feature 1..23: note = Synthetic construct
  source 1..23: mol_type = other DNA
gaccttgcattgccttaacaata

SEQ ID NO: 12880 - DNA, 23 bp, synthetic construct
  misc_feature 1..23: note = Synthetic construct
  source 1..23: mol_type = other DNA
accttgcattgccttaacaataa

SEQ ID NO: 12881 - DNA, 23 bp, synthetic construct
  misc_feature 1..23: note = Synthetic construct
  source 1..23: mol_type = other DNA
ccttgcattgccttaacaataag

SEQ ID NO: 12882 - DNA, 23 bp, synthetic construct
  misc_feature 1..23: note = Synthetic construct
  source 1..23: mol_type = other DNA
cttgcattgccttaacaataagc

SEQ ID NO: 12883 - DNA, 23 bp, synthetic construct
  misc_feature 1..23: note = Synthetic construct
  source 1..23: mol_type = other DNA
ttgcattgccttaacaataagct

SEQ ID NO: 12884 - DNA, 23 bp, synthetic construct
  misc_feature 1..23: note = Synthetic construct
  source 1..23: mol_type = other DNA
tgcattgccttaacaataagctc

SEQ ID NO: 12885 - DNA, 23 bp, synthetic construct
  misc_feature 1..23: note = Synthetic construct
  source 1..23: mol_type = other DNA
gcattgccttaacaataagctcg

SEQ ID NO: 12886 - DNA, 23 bp, synthetic construct
  misc_feature 1..23: note = Synthetic construct
  source 1..23: mol_type = other DNA
cattgccttaacaataagctcgc

SEQ ID NO: 12887 - DNA, 23 bp, synthetic construct
  misc_feature 1..23: note = Synthetic construct
  source 1..23: mol_type = other DNA
attgccttaacaataagctcgca

SEQ ID NO: 12888 - DNA, 23 bp, synthetic construct
  misc_feature 1..23: note = Synthetic construct
  source 1..23: mol_type = other DNA
ttgccttaacaataagctcgcag

SEQ ID NO: 12889 - DNA, 23 bp, synthetic construct
  misc_feature 1..23: note = Synthetic construct
  source 1..23: mol_type = other DNA
tgccttaacaataagctcgcagt

SEQ ID NO: 12890 - DNA, 23 bp, synthetic construct
  misc_feature 1..23: note = Synthetic construct
  source 1..23: mol_type = other DNA
gccttaacaataagctcgcagtc

SEQ ID NO: 12891 - DNA, 23 bp, synthetic construct
  misc_feature 1..23: note = Synthetic construct
  source 1..23: mol_type = other DNA
ccttaacaataagctcgcagtcg

SEQ ID NO: 12892 - DNA, 23 bp, synthetic construct
  misc_feature 1..23: note = Synthetic construct
  source 1..23: mol_type = other DNA
cttaacaataagctcgcagtcgg

SEQ ID NO: 12893 - DNA, 23 bp, synthetic construct
  misc_feature 1..23: note = Synthetic construct
  source 1..23: mol_type = other DNA
ttaacaataagctcgcagtcgga

SEQ ID NO: 12894 - DNA, 23 bp, synthetic construct
  misc_feature 1..23: note = Synthetic construct
  source 1..23: mol_type = other DNA
taacaataagctcgcagtcggaa

SEQ ID NO: 12895 - DNA, 23 bp, synthetic construct
  misc_feature 1..23: note = Synthetic construct
  source 1..23: mol_type = other DNA
aacaataagctcgcagtcggaat

SEQ ID NO: 12896 - DNA, 23 bp, synthetic construct
  misc_feature 1..23: note = Synthetic construct
  source 1..23: mol_type = other DNA
acaataagctcgcagtcggaatt

SEQ ID NO: 12897 - DNA, 23 bp, synthetic construct
  misc_feature 1..23: note = Synthetic construct
  source 1..23: mol_type = other DNA
caataagctcgcagtcggaattc

SEQ ID NO: 12898 - DNA, 23 bp, synthetic construct
  misc_feature 1..23: note = Synthetic construct
  source 1..23: mol_type = other DNA
aataagctcgcagtcggaattcg

SEQ ID NO: 12899 - DNA, 23 bp, synthetic construct
  misc_feature 1..23: note = Synthetic construct
  source 1..23: mol_type = other DNA
ataagctcgcagtcggaattcgt

SEQ ID NO: 12900 - DNA, 23 bp, synthetic construct
  misc_feature 1..23: note = Synthetic construct
  source 1..23: mol_type = other DNA
taagctcgcagtcggaattcgta

SEQ ID NO: 12901 - DNA, 23 bp, synthetic construct
  misc_feature 1..23: note = Synthetic construct
  source 1..23: mol_type = other DNA
aagctcgcagtcggaattcgtag

SEQ ID NO: 12902 - DNA, 23 bp, synthetic construct
  misc_feature 1..23: note = Synthetic construct
  source 1..23: mol_type = other DNA
agctcgcagtcggaattcgtagc

SEQ ID NO: 12903 - DNA, 23 bp, synthetic construct
  misc_feature 1..23: note = Synthetic construct
  source 1..23: mol_type = other DNA
gctcgcagtcggaattcgtagcg

SEQ ID NO: 12904 - DNA, 23 bp, synthetic construct
  misc_feature 1..23: note = Synthetic construct
  source 1..23: mol_type = other DNA
ctcgcagtcggaattcgtagcga

SEQ ID NO: 12905 - DNA, 23 bp, synthetic construct
  misc_feature 1..23: note = Synthetic construct
  source 1..23: mol_type = other DNA
tcgcagtcggaattcgtagcgaa

SEQ ID NO: 12906 - DNA, 23 bp, synthetic construct
  misc_feature 1..23: note = Synthetic construct
  source 1..23: mol_type = other DNA
cgcagtcggaattcgtagcgaaa

SEQ ID NO: 12907 - DNA, 23 bp, synthetic construct
  misc_feature 1..23: note = Synthetic construct
  source 1..23: mol_type = other DNA
gcagtcggaattcgtagcgaaaa

SEQ ID NO: 12908 - DNA, 23 bp, synthetic construct
  misc_feature 1..23: note = Synthetic construct
  source 1..23: mol_type = other DNA
cagtcggaattcgtagcgaaaat

SEQ ID NO: 12909 - DNA, 23 bp, synthetic construct
  misc_feature 1..23: note = Synthetic construct
  source 1..23: mol_type = other DNA
agtcggaattcgtagcgaaaatt

SEQ ID NO: 12910 - DNA, 23 bp, synthetic construct
  misc_feature 1..23: note = Synthetic construct
  source 1..23: mol_type = other DNA
gtcggaattcgtagcgaaaattg

SEQ ID NO: 12911 - DNA, 23 bp, synthetic construct
  misc_feature 1..23: note = Synthetic construct
  source 1..23: mol_type = other DNA
tcggaattcgtagcgaaaattgg

SEQ ID NO: 12912 - DNA, 23 bp, synthetic construct
  misc_feature 1..23: note = Synthetic construct
  source 1..23: mol_type = other DNA
cggaattcgtagcgaaaattgga

SEQ ID NO: 12913 - DNA, 23 bp, synthetic construct
  misc_feature 1..23: note = Synthetic construct
  source 1..23: mol_type = other DNA
ggaattcgtagcgaaaattggaa

SEQ ID NO: 12914 - DNA, 23 bp, synthetic construct
  misc_feature 1..23: note = Synthetic construct
  source 1..23: mol_type = other DNA
gaattcgtagcgaaaattggaat

SEQ ID NO: 12915 - DNA, 23 bp, synthetic construct
  misc_feature 1..23: note = Synthetic construct
  source 1..23: mol_type = other DNA
aattcgtagcgaaaattggaatg

SEQ ID NO: 12916 - DNA, 23 bp, synthetic construct
  misc_feature 1..23: note = Synthetic construct
  source 1..23: mol_type = other DNA
attcgtagcgaaaattggaatgg

SEQ ID NO: 12917 - DNA, 23 bp, synthetic construct
  misc_feature 1..23: note = Synthetic construct
  source 1..23: mol_type = other DNA
ttcgtagcgaaaattggaatggt

SEQ ID NO: 12918 - DNA, 23 bp, synthetic construct
  misc_feature 1..23: note = Synthetic construct
  source 1..23: mol_type = other DNA
tcgtagcgaaaattggaatggtt

SEQ ID NO: 12919 - DNA, 23 bp, synthetic construct
  misc_feature 1..23: note = Synthetic construct
  source 1..23: mol_type = other DNA
cgtagcgaaaattggaatggtta

SEQ ID NO: 12920 - DNA, 23 bp, synthetic construct
  misc_feature 1..23: note = Synthetic construct
  source 1..23: mol_type = other DNA
gtagcgaaaattggaatggttag

SEQ ID NO: 12921 - DNA, 23 bp, synthetic construct
  misc_feature 1..23: note = Synthetic construct
  source 1..23: mol_type = other DNA
tagcgaaaattggaatggttagt

SEQ ID NO: 12922 - DNA, 23 bp, synthetic construct
  misc_feature 1..23: note = Synthetic construct
  source 1..23: mol_type = other DNA
agcgaaaattggaatggttagtt

SEQ ID NO: 12923 - DNA, 23 bp, synthetic construct
  misc_feature 1..23: note = Synthetic construct
  source 1..23: mol_type = other DNA
gcgaaaattggaatggttagttc

SEQ ID NO: 12924 - DNA, 23 bp, synthetic construct
  misc_feature 1..23: note = Synthetic construct
  source 1..23: mol_type = other DNA
cgaaaattggaatggttagttcc

SEQ ID NO: 12925 - DNA, 23 bp, synthetic construct
  misc_feature 1..23: note = Synthetic construct
  source 1..23: mol_type = other DNA
gaaaattggaatggttagttcca

SEQ ID NO: 12926 - DNA, 23 bp, synthetic construct
  misc_feature 1..23: note = Synthetic construct
  source 1..23: mol_type = other DNA
aaaattggaatggttagttccat

SEQ ID NO: 12927 - DNA, 23 bp, synthetic construct
  misc_feature 1..23: note = Synthetic construct
  source 1..23: mol_type = other DNA
aaattggaatggttagttccata

SEQ ID NO: 12928 - DNA, 23 bp, synthetic construct
  misc_feature 1..23: note = Synthetic construct
  source 1..23: mol_type = other DNA
aattggaatggttagttccatat

SEQ ID NO: 12929 - DNA, 23 bp, synthetic construct
  misc_feature 1..23: note = Synthetic construct
  source 1..23: mol_type = other DNA
attggaatggttagttccatatt

SEQ ID NO: 12930 - DNA, 23 bp, synthetic construct
  misc_feature 1..23: note = Synthetic construct
  source 1..23: mol_type = other DNA
ttggaatggttagttccatattt

SEQ ID NO: 12931 - DNA, 23 bp, synthetic construct
  misc_feature 1..23: note = Synthetic construct
  source 1..23: mol_type = other DNA
tggaatggttagttccatattta

SEQ ID NO: 12932 - DNA, 23 bp, synthetic construct
  misc_feature 1..23: note = Synthetic construct
  source 1..23: mol_type = other DNA
ggaatggttagttccatatttaa

SEQ ID NO: 12933 - DNA, 23 bp, synthetic construct
  misc_feature 1..23: note = Synthetic construct
  source 1..23: mol_type = other DNA
gaatggttagttccatatttaag

SEQ ID NO: 12934 - DNA, 23 bp, synthetic construct
  misc_feature 1..23: note = Synthetic construct
  source 1..23: mol_type = other DNA
aatggttagttccatatttaagt

SEQ ID NO: 12935 - DNA, 23 bp, synthetic construct
  misc_feature 1..23: note = Synthetic construct
  source 1..23: mol_type = other DNA
atggttagttccatatttaagta

SEQ ID NO: 12936 - DNA, 23 bp, synthetic construct
  misc_feature 1..23: note = Synthetic construct
  source 1..23: mol_type = other DNA
tggttagttccatatttaagtac

SEQ ID NO: 12937 - DNA, 23 bp, synthetic construct
  misc_feature 1..23: note = Synthetic construct
  source 1..23: mol_type = other DNA
ggttagttccatatttaagtacg

SEQ ID NO: 12938 - DNA, 23 bp, synthetic construct
  misc_feature 1..23: note = Synthetic construct
  source 1..23: mol_type = other DNA
gttagttccatatttaagtacga

SEQ ID NO: 12939 - DNA, 23 bp, synthetic construct
  misc_feature 1..23: note = Synthetic construct
  source 1..23: mol_type = other DNA
ttagttccatatttaagtacgaa

SEQ ID NO: 12940 - DNA, 23 bp, synthetic construct
  misc_feature 1..23: note = Synthetic construct
  source 1..23: mol_type = other DNA
tagttccatatttaagtacgaac

SEQ ID NO: 12941 - DNA, 23 bp, synthetic construct
  misc_feature 1..23: note = Synthetic construct
  source 1..23: mol_type = other DNA
agttccatatttaagtacgaacg

SEQ ID NO: 12942 - DNA, 23 bp, synthetic construct
  misc_feature 1..23: note = Synthetic construct
  source 1..23: mol_type = other DNA
gttccatatttaagtacgaacgc

SEQ ID NO: 12943 - DNA, 23 bp, synthetic construct
  misc_feature 1..23: note = Synthetic construct
  source 1..23: mol_type = other DNA
ttccatatttaagtacgaacgcc

SEQ ID NO: 12944 - DNA, 23 bp, synthetic construct
  misc_feature 1..23: note = Synthetic construct
  source 1..23: mol_type = other DNA
tccatatttaagtacgaacgcca

SEQ ID NO: 12945 - DNA, 23 bp, synthetic construct
  misc_feature 1..23: note = Synthetic construct
  source 1..23: mol_type = other DNA
ccatatttaagtacgaacgccat

SEQ ID NO: 12946 - DNA, 23 bp, synthetic construct
  misc_feature 1..23: note = Synthetic construct
  source 1..23: mol_type = other DNA
catatttaagtacgaacgccatg

SEQ ID NO: 12947 - DNA, 23 bp, synthetic construct
  misc_feature 1..23: note = Synthetic construct
  source 1..23: mol_type = other DNA
atatttaagtacgaacgccatgc

SEQ ID NO: 12948 - DNA, 23 bp, synthetic construct
  misc_feature 1..23: note = Synthetic construct
  source 1..23: mol_type = other DNA
tatttaagtacgaacgccatgcg

SEQ ID NO: 12949 - DNA, 23 bp, synthetic construct
  misc_feature 1..23: note = Synthetic construct
  source 1..23: mol_type = other DNA
atttaagtacgaacgccatgcgg

SEQ ID NO: 12950 - DNA, 23 bp, synthetic construct
  misc_feature 1..23: note = Synthetic construct
  source 1..23: mol_type = other DNA
tttaagtacgaacgccatgcggc

SEQ ID NO: 12951 - DNA, 23 bp, synthetic construct
  misc_feature 1..23: note = Synthetic construct
  source 1..23: mol_type = other DNA
ttaagtacgaacgccatgcggct

SEQ ID NO: 12952 - DNA, 23 bp, synthetic construct
  misc_feature 1..23: note = Synthetic construct
  source 1..23: mol_type = other DNA
taagtacgaacgccatgcggcta

SEQ ID NO: 12953 - DNA, 23 bp, synthetic construct
  misc_feature 1..23: note = Synthetic construct
  source 1..23: mol_type = other DNA
aagtacgaacgccatgcggctac

SEQ ID NO: 12954 - DNA, 23 bp, synthetic construct
  misc_feature 1..23: note = Synthetic construct
  source 1..23: mol_type = other DNA
agtacgaacgccatgcggctaca

SEQ ID NO: 12955 - DNA, 23 bp, synthetic construct
  misc_feature 1..23: note = Synthetic construct
  source 1..23: mol_type = other DNA
gtacgaacgccatgcggctacag

SEQ ID NO: 12956 - DNA, 23 bp, synthetic construct
  misc_feature 1..23: note = Synthetic construct
  source 1..23: mol_type = other DNA
tacgaacgccatgcggctacagg

SEQ ID NO: 12957 - DNA, 23 bp, synthetic construct
  misc_feature 1..23: note = Synthetic construct
  source 1..23: mol_type = other DNA
acgaacgccatgcggctacagga

SEQ ID NO: 12958 - DNA, 23 bp, synthetic construct
  misc_feature 1..23: note = Synthetic construct
  source 1..23: mol_type = other DNA
cgaacgccatgcggctacaggaa

SEQ ID NO: 12959 - DNA, 23 bp, synthetic construct
  misc_feature 1..23: note = Synthetic construct
  source 1..23: mol_type = other DNA
gaacgccatgcggctacaggaag

SEQ ID NO: 12960 - DNA, 23 bp, synthetic construct
  misc_feature 1..23: note = Synthetic construct
  source 1..23: mol_type = other DNA
aacgccatgcggctacaggaagc

SEQ ID NO: 12961 - DNA, 23 bp, synthetic construct
  misc_feature 1..23: note = Synthetic construct
  source 1..23: mol_type = other DNA
acgccatgcggctacaggaagct

SEQ ID NO: 12962 - DNA, 23 bp, synthetic construct
  misc_feature 1..23: note = Synthetic construct
  source 1..23: mol_type = other DNA
cgccatgcggctacaggaagctc

SEQ ID NO: 12963 - DNA, 23 bp, synthetic construct
  misc_feature 1..23: note = Synthetic construct
  source 1..23: mol_type = other DNA
gccatgcggctacaggaagctct

SEQ ID NO: 12964 - DNA, 23 bp, synthetic construct
  misc_feature 1..23: note = Synthetic construct
  source 1..23: mol_type = other DNA
ccatgcggctacaggaagctcta

SEQ ID NO: 12965 - DNA, 23 bp, synthetic construct
  misc_feature 1..23: note = Synthetic construct
  source 1..23: mol_type = other DNA
catgcggctacaggaagctctac

SEQ ID NO: 12966 - DNA, 23 bp, synthetic construct
  misc_feature 1..23: note = Synthetic construct
  source 1..23: mol_type = other DNA
atgcggctacaggaagctctaca

SEQ ID NO: 12967 - DNA, 23 bp, synthetic construct
  misc_feature 1..23: note = Synthetic construct
  source 1..23: mol_type = other DNA
tgcggctacaggaagctctacac

SEQ ID NO: 12968 - DNA, 23 bp, synthetic construct
  misc_feature 1..23: note = Synthetic construct
  source 1..23: mol_type = other DNA
gcggctacaggaagctctacacc

SEQ ID NO: 12969 - DNA, 23 bp, synthetic construct
  misc_feature 1..23: note = Synthetic construct
  source 1..23: mol_type = other DNA
cggctacaggaagctctacacca

SEQ ID NO: 12970 - DNA, 23 bp, synthetic construct
  misc_feature 1..23: note = Synthetic construct
  source 1..23: mol_type = other DNA
ggctacaggaagctctacaccac

SEQ ID NO: 12971 - DNA, 23 bp, synthetic construct
  misc_feature 1..23: note = Synthetic construct
  source 1..23: mol_type = other DNA
gctacaggaagctctacaccacc

SEQ ID NO: 12972 - DNA, 23 bp, synthetic construct
  misc_feature 1..23: note = Synthetic construct
  source 1..23: mol_type = other DNA
ctacaggaagctctacaccacca

SEQ ID NO: 12973 - DNA, 23 bp, synthetic construct
  misc_feature 1..23: note = Synthetic construct
  source 1..23: mol_type = other DNA
tacaggaagctctacaccaccaa

SEQ ID NO: 12974 - DNA, 23 bp, synthetic construct
  misc_feature 1..23: note = Synthetic construct
  source 1..23: mol_type = other DNA
acaggaagctctacaccaccaac

SEQ ID NO: 12975 - DNA, 23 bp, synthetic construct
  misc_feature 1..23: note = Synthetic construct
  source 1..23: mol_type = other DNA
caggaagctctacaccaccaaca

SEQ ID NO: 12976 - DNA, 23 bp, synthetic construct
  misc_feature 1..23: note = Synthetic construct
  source 1..23: mol_type = other DNA
aggaagctctacaccaccaacag

SEQ ID NO: 12977 - DNA, 23 bp, synthetic construct
  misc_feature 1..23: note = Synthetic construct
  source 1..23: mol_type = other DNA
ggaagctctacaccaccaacagt

SEQ ID NO: 12978 - DNA, 23 bp, synthetic construct
  misc_feature 1..23: note = Synthetic construct
  source 1..23: mol_type = other DNA
gaagctctacaccaccaacagtc

SEQ ID NO: 12979 - DNA, 23 bp, synthetic construct
  misc_feature 1..23: note = Synthetic construct
  source 1..23: mol_type = other DNA
aagctctacaccaccaacagtct

SEQ ID NO: 12980 - DNA, 23 bp, synthetic construct
  misc_feature 1..23: note = Synthetic construct
  source 1..23: mol_type = other DNA
agctctacaccaccaacagtctg

SEQ ID NO: 12981 - DNA, 23 bp, synthetic construct
  misc_feature 1..23: note = Synthetic construct
  source 1..23: mol_type = other DNA
gctctacaccaccaacagtctgg

SEQ ID NO: 12982 - DNA, 23 bp, synthetic construct
  misc_feature 1..23: note = Synthetic construct
  source 1..23: mol_type = other DNA
ctctacaccaccaacagtctggg

SEQ ID NO: 12983 - DNA, 23 bp, synthetic construct
  misc_feature 1..23: note = Synthetic construct
  source 1..23: mol_type = other DNA
tctacaccaccaacagtctgggt

SEQ ID NO: 12984 - DNA, 23 bp, synthetic construct
  misc_feature 1..23: note = Synthetic construct
  source 1..23: mol_type = other DNA
ctacaccaccaacagtctgggtt

SEQ ID NO: 12985 - DNA, 23 bp, synthetic construct
  misc_feature 1..23: note = Synthetic construct
  source 1..23: mol_type = other DNA
tacaccaccaacagtctgggttg

SEQ ID NO: 12986 - DNA, 23 bp, synthetic construct
  misc_feature 1..23: note = Synthetic construct
  source 1..23: mol_type = other DNA
acaccaccaacagtctgggttgc

SEQ ID NO: 12987 - DNA, 23 bp, synthetic construct
  misc_feature 1..23: note = Synthetic construct
  source 1..23: mol_type = other DNA
caccaccaacagtctgggttgcc

SEQ ID NO: 12988 - DNA, 23 bp, synthetic construct
  misc_feature 1..23: note = Synthetic construct
  source 1..23: mol_type = other DNA
accaccaacagtctgggttgcca

SEQ ID NO: 12989 - DNA, 23 bp, synthetic construct
  misc_feature 1..23: note = Synthetic construct
  source 1..23: mol_type = other DNA
ccaccaacagtctgggttgccac

SEQ ID NO: 12990 - DNA, 23 bp, synthetic construct
  misc_feature 1..23: note = Synthetic construct
  source 1..23: mol_type = other DNA
caccaacagtctgggttgccact

SEQ ID NO: 12991 - DNA, 23 bp, synthetic construct
  misc_feature 1..23: note = Synthetic construct
  source 1..23: mol_type = other DNA
accaacagtctgggttgccactt

SEQ ID NO: 12992 - DNA, 23 bp, synthetic construct
  misc_feature 1..23: note = Synthetic construct
  source 1..23: mol_type = other DNA
ccaacagtctgggttgccacttt

SEQ ID NO: 12993 - DNA, 23 bp, synthetic construct
  misc_feature 1..23: note = Synthetic construct
  source 1..23: mol_type = other DNA
caacagtctgggttgccacttta

SEQ ID NO: 12994 - DNA, 23 bp, synthetic construct
  misc_feature 1..23: note = Synthetic construct
  source 1..23: mol_type = other DNA
aacagtctgggttgccactttag

SEQ ID NO: 12995 - DNA, 23 bp, synthetic construct
  misc_feature 1..23: note = Synthetic construct
  source 1..23: mol_type = other DNA
acagtctgggttgccactttagg

SEQ ID NO: 12996 - DNA, 23 bp, synthetic construct
  misc_feature 1..23: note = Synthetic construct
  source 1..23: mol_type = other DNA
cagtctgggttgccactttaggc

SEQ ID NO: 12997 - DNA, 23 bp, synthetic construct
  misc_feature 1..23: note = Synthetic construct
  source 1..23: mol_type = other DNA
agtctgggttgccactttaggca

SEQ ID NO: 12998 - DNA, 23 bp, synthetic construct
  misc_feature 1..23: note = Synthetic construct
  source 1..23: mol_type = other DNA
gtctgggttgccactttaggcac

SEQ ID NO: 12999 - DNA, 23 bp, synthetic construct
  misc_feature 1..23: note = Synthetic construct
  source 1..23: mol_type = other DNA
tctgggttgccactttaggcacc

SEQ ID NO: 13000 - DNA, 23 bp, synthetic construct
  misc_feature 1..23: note = Synthetic construct
  source 1..23: mol_type = other DNA
ctgggttgccactttaggcacct

SEQ ID NO: 13001 - DNA, 23 bp, synthetic construct
  misc_feature 1..23: note = Synthetic construct
  source 1..23: mol_type = other DNA
tgggttgccactttaggcacctc

SEQ ID NO: 13002 - DNA, 23 bp, synthetic construct
  misc_feature 1..23: note = Synthetic construct
  source 1..23: mol_type = other DNA
gggttgccactttaggcacctcg

SEQ ID NO: 13003 - DNA, 23 bp, synthetic construct
  misc_feature 1..23: note = Synthetic construct
  source 1..23: mol_type = other DNA
ggttgccactttaggcacctcga

SEQ ID NO: 13004 - DNA, 23 bp, synthetic construct
  misc_feature 1..23: note = Synthetic construct
  source 1..23: mol_type = other DNA
gttgccactttaggcacctcgac

SEQ ID NO: 13005 - DNA, 23 bp, synthetic construct
  misc_feature 1..23: note = Synthetic construct
  source 1..23: mol_type = other DNA
ttgccactttaggcacctcgact

SEQ ID NO: 13006 - DNA, 23 bp, synthetic construct
  misc_feature 1..23: note = Synthetic construct
  source 1..23: mol_type = other DNA
tgccactttaggcacctcgactt

SEQ ID NO: 13007 - DNA, 23 bp, synthetic construct
  misc_feature 1..23: note = Synthetic construct
  source 1..23: mol_type = other DNA
gccactttaggcacctcgacttt

SEQ ID NO: 13008 - DNA, 23 bp, synthetic construct
  misc_feature 1..23: note = Synthetic construct
  source 1..23: mol_type = other DNA
ccactttaggcacctcgactttg

SEQ ID NO: 13009 - DNA, 23 bp, synthetic construct
  misc_feature 1..23: note = Synthetic construct
  source 1..23: mol_type = other DNA
cactttaggcacctcgactttga

SEQ ID NO: 13010 - DNA, 23 bp, synthetic construct
  misc_feature 1..23: note = Synthetic construct
  source 1..23: mol_type = other DNA
actttaggcacctcgactttgat

SEQ ID NO: 13011 - DNA, 23 bp, synthetic construct
  misc_feature 1..23: note = Synthetic construct
  source 1..23: mol_type = other DNA
ctttaggcacctcgactttgatg

SEQ ID NO: 13012 - DNA, 23 bp, synthetic construct
  misc_feature 1..23: note = Synthetic construct
  source 1..23: mol_type = other DNA
tttaggcacctcgactttgatgg

SEQ ID NO: 13013 - DNA, 23 bp, synthetic construct
  misc_feature 1..23: note = Synthetic construct
  source 1..23: mol_type = other DNA
ttaggcacctcgactttgatggt

SEQ ID NO: 13014 - DNA, 23 bp, synthetic construct
  misc_feature 1..23: note = Synthetic construct
  source 1..23: mol_type = other DNA
taggcacctcgactttgatggtg

SEQ ID NO: 13015 - DNA, 23 bp, synthetic construct
  misc_feature 1..23: note = Synthetic construct
  source 1..23: mol_type = other DNA
aggcacctcgactttgatggtgt

SEQ ID NO: 13016 - DNA, 23 bp, synthetic construct
  misc_feature 1..23: note = Synthetic construct
  source 1..23: mol_type = other DNA
ggcacctcgactttgatggtgta

SEQ ID NO: 13017 - DNA, 23 bp, synthetic construct
  misc_feature 1..23: note = Synthetic construct
  source 1..23: mol_type = other DNA
gcacctcgactttgatggtgtat

SEQ ID NO: 13018 - DNA, 23 bp, synthetic construct
  misc_feature 1..23: note = Synthetic construct
  source 1..23: mol_type = other DNA
cacctcgactttgatggtgtatt

SEQ ID NO: 13019 - DNA, 23 bp, synthetic construct
  misc_feature 1..23: note = Synthetic construct
  source 1..23: mol_type = other DNA
acctcgactttgatggtgtattt

SEQ ID NO: 13020 - DNA, 23 bp, synthetic construct
  misc_feature 1..23: note = Synthetic construct
  source 1..23: mol_type = other DNA
cctcgactttgatggtgtatttg

SEQ ID NO: 13021 - DNA, 23 bp, synthetic construct
  misc_feature 1..23: note = Synthetic construct
  source 1..23: mol_type = other DNA
ctcgactttgatggtgtatttgc

SEQ ID NO: 13022 - DNA, 23 bp, synthetic construct
  misc_feature 1..23: note = Synthetic construct
  source 1..23: mol_type = other DNA
tcgactttgatggtgtatttgcg

SEQ ID NO: 13023 - DNA, 23 bp, synthetic construct
  misc_feature 1..23: note = Synthetic construct
  source 1..23: mol_type = other DNA
cgactttgatggtgtatttgcga

SEQ ID NO: 13024 - DNA, 23 bp, synthetic construct
  misc_feature 1..23: note = Synthetic construct
  source 1..23: mol_type = other DNA
gactttgatggtgtatttgcgat

SEQ ID NO: 13025 - DNA, 23 bp, synthetic construct
  misc_feature 1..23: note = Synthetic construct
  source 1..23: mol_type = other DNA
actttgatggtgtatttgcgatt

SEQ ID NO: 13026 - DNA, 23 bp, synthetic construct
  misc_feature 1..23: note = Synthetic construct
  source 1..23: mol_type = other DNA
ctttgatggtgtatttgcgattc

SEQ ID NO: 13027 - DNA, 23 bp, synthetic construct
  misc_feature 1..23: note = Synthetic construct
  source 1..23: mol_type = other DNA
tttgatggtgtatttgcgattct

SEQ ID NO: 13028 - DNA, 23 bp, synthetic construct
  misc_feature 1..23: note = Synthetic construct
  source 1..23: mol_type = other DNA
ttgatggtgtatttgcgattctg

SEQ ID NO: 13029 - DNA, 23 bp, synthetic construct
  misc_feature 1..23: note = Synthetic construct
  source 1..23: mol_type = other DNA
tgatggtgtatttgcgattctgc

SEQ ID NO: 13030 - DNA, 23 bp, synthetic construct
  misc_feature 1..23: note = Synthetic construct
  source 1..23: mol_type = other DNA
gatggtgtatttgcgattctgcg

SEQ ID NO: 13031 - DNA, 23 bp, synthetic construct
  misc_feature 1..23: note = Synthetic construct
  source 1..23: mol_type = other DNA
atggtgtatttgcgattctgcgc

SEQ ID NO: 13032 - DNA, 23 bp, synthetic construct
  misc_feature 1..23: note = Synthetic construct
  source 1..23: mol_type = other DNA
tggtgtatttgcgattctgcgca

SEQ ID NO: 13033 - DNA, 23 bp, synthetic construct
  misc_feature 1..23: note = Synthetic construct
  source 1..23: mol_type = other DNA
ggtgtatttgcgattctgcgcag

SEQ ID NO: 13034 - DNA, 23 bp, synthetic construct
  misc_feature 1..23: note = Synthetic construct
  source 1..23: mol_type = other DNA
gtgtatttgcgattctgcgcaga

SEQ ID NO: 13035 - DNA, 23 bp, synthetic construct
  misc_feature 1..23: note = Synthetic construct
  source 1..23: mol_type = other DNA
tgtatttgcgattctgcgcagag

SEQ ID NO: 13036 - DNA, 23 bp, synthetic construct
  misc_feature 1..23: note = Synthetic construct
  source 1..23: mol_type = other DNA
gtatttgcgattctgcgcagagc

SEQ ID NO: 13037 - DNA, 23 bp, synthetic construct
  misc_feature 1..23: note = Synthetic construct
  source 1..23: mol_type = other DNA
tatttgcgattctgcgcagagct

SEQ ID NO: 13038 - DNA, 23 bp, synthetic construct
  misc_feature 1..23: note = Synthetic construct
  source 1..23: mol_type = other DNA
atttgcgattctgcgcagagctc

SEQ ID NO: 13039 - DNA, 23 bp, synthetic construct
  misc_feature 1..23: note = Synthetic construct
  source 1..23: mol_type = other DNA
tttgcgattctgcgcagagctct

SEQ ID NO: 13040 - DNA, 23 bp, synthetic construct
  misc_feature 1..23: note = Synthetic construct
  source 1..23: mol_type = other DNA
ttgcgattctgcgcagagctctg

SEQ ID NO: 13041 - DNA, 23 bp, synthetic construct
  misc_feature 1..23: note = Synthetic construct
  source 1..23: mol_type = other DNA
tgcgattctgcgcagagctctga

SEQ ID NO: 13042 - DNA, 23 bp, synthetic construct
  misc_feature 1..23: note = Synthetic construct
  source 1..23: mol_type = other DNA
gcgattctgcgcagagctctgac

SEQ ID NO: 13043 - DNA, 23 bp, synthetic construct
  misc_feature 1..23: note = Synthetic construct
  source 1..23: mol_type = other DNA
cgattctgcgcagagctctgacg

SEQ ID NO: 13044 - DNA, 23 bp, synthetic construct
  misc_feature 1..23: note = Synthetic construct
  source 1..23: mol_type = other DNA
gattctgcgcagagctctgacga

SEQ ID NO: 13045 - DNA, 23 bp, synthetic construct
  misc_feature 1..23: note = Synthetic construct
  source 1..23: mol_type = other DNA
attctgcgcagagctctgacgaa

SEQ ID NO: 13046 - DNA, 23 bp, synthetic construct
  misc_feature 1..23: note = Synthetic construct
  source 1..23: mol_type = other DNA
ttctgcgcagagctctgacgaac

SEQ ID NO: 13047 - DNA, 23 bp, synthetic construct
  misc_feature 1..23: note = Synthetic construct
  source 1..23: mol_type = other DNA
tctgcgcagagctctgacgaacg

SEQ ID NO: 13048 - DNA, 23 bp, synthetic construct
  misc_feature 1..23: note = Synthetic construct
  source 1..23: mol_type = other DNA
ctgcgcagagctctgacgaacgc

SEQ ID NO: 13049 - DNA, 23 bp, synthetic construct
  misc_feature 1..23: note = Synthetic construct
  source 1..23: mol_type = other DNA
tgcgcagagctctgacgaacgct

SEQ ID NO: 13050 - DNA, 23 bp, synthetic construct
  misc_feature 1..23: note = Synthetic construct
  source 1..23: mol_type = other DNA
gcgcagagctctgacgaacgcta

SEQ ID NO: 13051 - DNA, 23 bp, synthetic construct
  misc_feature 1..23: note = Synthetic construct
  source 1..23: mol_type = other DNA
cgcagagctctgacgaacgctac

SEQ ID NO: 13052 - DNA, 23 bp, synthetic construct
  misc_feature 1..23: note = Synthetic construct
  source 1..23: mol_type = other DNA
gcagagctctgacgaacgctaca

SEQ ID NO: 13053 - DNA, 23 bp, synthetic construct
  misc_feature 1..23: note = Synthetic construct
  source 1..23: mol_type = other DNA
cagagctctgacgaacgctacag

SEQ ID NO: 13054 - DNA, 23 bp, synthetic construct
  misc_feature 1..23: note = Synthetic construct
  source 1..23: mol_type = other DNA
agagctctgacgaacgctacagg

SEQ ID NO: 13055 - DNA, 23 bp, synthetic construct
  misc_feature 1..23: note = Synthetic construct
  source 1..23: mol_type = other DNA
gagctctgacgaacgctacaggt

SEQ ID NO: 13056 - DNA, 23 bp, synthetic construct
  misc_feature 1..23: note = Synthetic construct
  source 1..23: mol_type = other DNA
agctctgacgaacgctacaggtt

SEQ ID NO: 13057 - DNA, 23 bp, synthetic construct
  misc_feature 1..23: note = Synthetic construct
  source 1..23: mol_type = other DNA
gctctgacgaacgctacaggtta

SEQ ID NO: 13058 - DNA, 23 bp, synthetic construct
  misc_feature 1..23: note = Synthetic construct
  source 1..23: mol_type = other DNA
ctctgacgaacgctacaggttac

SEQ ID NO: 13059 - DNA, 23 bp, synthetic construct
  misc_feature 1..23: note = Synthetic construct
  source 1..23: mol_type = other DNA
tctgacgaacgctacaggttact

SEQ ID NO: 13060 - DNA, 23 bp, synthetic construct
  misc_feature 1..23: note = Synthetic construct
  source 1..23: mol_type = other DNA
ctgacgaacgctacaggttactt

SEQ ID NO: 13061 - DNA, 23 bp, synthetic construct
  misc_feature 1..23: note = Synthetic construct
  source 1..23: mol_type = other DNA
tgacgaacgctacaggttacttt

SEQ ID NO: 13062 - DNA, 23 bp, synthetic construct
  misc_feature 1..23: note = Synthetic construct
  source 1..23: mol_type = other DNA
gacgaacgctacaggttactttg

SEQ ID NO: 13063 - DNA, 23 bp, synthetic construct
  misc_feature 1..23: note = Synthetic construct
  source 1..23: mol_type = other DNA
acgaacgctacaggttactttgt

SEQ ID NO: 13064 - DNA, 23 bp, synthetic construct
  misc_feature 1..23: note = Synthetic construct
  source 1..23: mol_type = other DNA
cgaacgctacaggttactttgta

SEQ ID NO: 13065 - DNA, 23 bp, synthetic construct
  misc_feature 1..23: note = Synthetic construct
  source 1..23: mol_type = other DNA
gaacgctacaggttactttgtaa

SEQ ID NO: 13066 - DNA, 23 bp, synthetic construct
  misc_feature 1..23: note = Synthetic construct
  source 1..23: mol_type = other DNA
aacgctacaggttactttgtaag

SEQ ID NO: 13067 - DNA, 23 bp, synthetic construct
  misc_feature 1..23: note = Synthetic construct
  source 1..23: mol_type = other DNA
acgctacaggttactttgtaagc

SEQ ID NO: 13068 - DNA, 23 bp, synthetic construct
  misc_feature 1..23: note = Synthetic construct
  source 1..23: mol_type = other DNA
cgctacaggttactttgtaagcc

SEQ ID NO: 13069 - DNA, 23 bp, synthetic construct
  misc_feature 1..23: note = Synthetic construct
  source 1..23: mol_type = other DNA
gctacaggttactttgtaagcct

SEQ ID NO: 13070 - DNA, 23 bp, synthetic construct
  misc_feature 1..23: note = Synthetic construct
  source 1..23: mol_type = other DNA
ctacaggttactttgtaagcctg

SEQ ID NO: 13071 - DNA, 23 bp, synthetic construct
  misc_feature 1..23: note = Synthetic construct
  source 1..23: mol_type = other DNA
tacaggttactttgtaagcctgt

SEQ ID NO: 13072 - DNA, 23 bp, synthetic construct
  misc_feature 1..23: note = Synthetic construct
  source 1..23: mol_type = other DNA
acaggttactttgtaagcctgtg

SEQ ID NO: 13073 - DNA, 23 bp, synthetic construct
  misc_feature 1..23: note = Synthetic construct
  source 1..23: mol_type = other DNA
caggttactttgtaagcctgtga

SEQ ID NO: 13074 - DNA, 23 bp, synthetic construct
  misc_feature 1..23: note = Synthetic construct
  source 1..23: mol_type = other DNA
aggttactttgtaagcctgtgaa

SEQ ID NO: 13075 - DNA, 23 bp, synthetic construct
  misc_feature 1..23: note = Synthetic construct
  source 1..23: mol_type = other DNA
ggttactttgtaagcctgtgaac

SEQ ID NO: 13076 - DNA, 23 bp, synthetic construct
  misc_feature 1..23: note = Synthetic construct
  source 1..23: mol_type = other DNA
gttactttgtaagcctgtgaacg

SEQ ID NO: 13077 - DNA, 23 bp, synthetic construct
  misc_feature 1..23: note = Synthetic construct
  source 1..23: mol_type = other DNA
ttactttgtaagcctgtgaacgc

SEQ ID NO: 13078 - DNA, 23 bp, synthetic construct
  misc_feature 1..23: note = Synthetic construct
  source 1..23: mol_type = other DNA
tactttgtaagcctgtgaacgcg

SEQ ID NO: 13079 - DNA, 23 bp, synthetic construct
  misc_feature 1..23: note = Synthetic construct
  source 1..23: mol_type = other DNA
actttgtaagcctgtgaacgcga

SEQ ID NO: 13080 - DNA, 23 bp, synthetic construct
  misc_feature 1..23: note = Synthetic construct
  source 1..23: mol_type = other DNA
ctttgtaagcctgtgaacgcgag

SEQ ID NO: 13081 - DNA, 23 bp, synthetic construct
  misc_feature 1..23: note = Synthetic construct
  source 1..23: mol_type = other DNA
tttgtaagcctgtgaacgcgagt

SEQ ID NO: 13082 - DNA, 23 bp, synthetic construct
  misc_feature 1..23: note = Synthetic construct
  source 1..23: mol_type = other DNA
ttgtaagcctgtgaacgcgagtt

SEQ ID NO: 13083 - DNA, 23 bp, synthetic construct
  misc_feature 1..23: note = Synthetic construct
  source 1..23: mol_type = other DNA
tgtaagcctgtgaacgcgagtta

SEQ ID NO: 13084 - DNA, 23 bp, synthetic construct
  misc_feature 1..23: note = Synthetic construct
  source 1..23: mol_type = other DNA
gtaagcctgtgaacgcgagttag

SEQ ID NO: 13085 - DNA, 23 bp, synthetic construct
  misc_feature 1..23: note = Synthetic construct
  source 1..23: mol_type = other DNA
taagcctgtgaacgcgagttaga

SEQ ID NO: 13086 - DNA, 23 bp, synthetic construct
  misc_feature 1..23: note = Synthetic construct
  source 1..23: mol_type = other DNA
aagcctgtgaacgcgagttagag

SEQ ID NO: 13087 - DNA, 23 bp, synthetic construct
  misc_feature 1..23: note = Synthetic construct
  source 1..23: mol_type = other DNA
agcctgtgaacgcgagttagagc

SEQ ID NO: 13088 - DNA, 23 bp, synthetic construct
  misc_feature 1..23: note = Synthetic construct
  source 1..23: mol_type = other DNA
gcctgtgaacgcgagttagagct

SEQ ID NO: 13089 - DNA, 23 bp, synthetic construct
  misc_feature 1..23: note = Synthetic construct
  source 1..23: mol_type = other DNA
cctgtgaacgcgagttagagctg

SEQ ID NO: 13090 - DNA, 23 bp, synthetic construct
  misc_feature 1..23: note = Synthetic construct
  source 1..23: mol_type = other DNA
ctgtgaacgcgagttagagctga

SEQ ID NO: 13091 - DNA, 23 bp, synthetic construct
  misc_feature 1..23: note = Synthetic construct
  source 1..23: mol_type = other DNA
tgtgaacgcgagttagagctgat

SEQ ID NO: 13092 - DNA, 23 bp, synthetic construct
  misc_feature 1..23: note = Synthetic construct
  source 1..23: mol_type = other DNA
gtgaacgcgagttagagctgatc

SEQ ID NO: 13093 - DNA, 23 bp, synthetic construct
  misc_feature 1..23: note = Synthetic construct
  source 1..23: mol_type = other DNA
tgaacgcgagttagagctgatcc

SEQ ID NO: 13094 - DNA, 23 bp, synthetic construct
  misc_feature 1..23: note = Synthetic construct
  source 1..23: mol_type = other DNA
gaacgcgagttagagctgatcca

SEQ ID NO: 13095 - DNA, 23 bp, synthetic construct
  misc_feature 1..23: note = Synthetic construct
  source 1..23: mol_type = other DNA
aacgcgagttagagctgatccat

SEQ ID NO: 13096 - DNA, 23 bp, synthetic construct
  misc_feature 1..23: note = Synthetic construct
  source 1..23: mol_type = other DNA
acgcgagttagagctgatccatt

SEQ ID NO: 13097 - DNA, 23 bp, synthetic construct
  misc_feature 1..23: note = Synthetic construct
  source 1..23: mol_type = other DNA
cgcgagttagagctgatccattc

SEQ ID NO: 13098 - DNA, 23 bp, synthetic construct
  misc_feature 1..23: note = Synthetic construct
  source 1..23: mol_type = other DNA
gcgagttagagctgatccattca

SEQ ID NO: 13099 - DNA, 23 bp, synthetic construct
  misc_feature 1..23: note = Synthetic construct
  source 1..23: mol_type = other DNA
cgagttagagctgatccattcag

SEQ ID NO: 13100 - DNA, 23 bp, synthetic construct
  misc_feature 1..23: note = Synthetic construct
  source 1..23: mol_type = other DNA
gagttagagctgatccattcagc

SEQ ID NO: 13101 - DNA, 23 bp, synthetic construct
  misc_feature 1..23: note = Synthetic construct
  source 1..23: mol_type = other DNA
agttagagctgatccattcagcg

SEQ ID NO: 13102 - DNA, 23 bp, synthetic construct
  misc_feature 1..23: note = Synthetic construct
  source 1..23: mol_type = other DNA
gttagagctgatccattcagcga

SEQ ID NO: 13103 - DNA, 23 bp, synthetic construct
  misc_feature 1..23: note = Synthetic construct
  source 1..23: mol_type = other DNA
ttagagctgatccattcagcgac

SEQ ID NO: 13104 - DNA, 23 bp, synthetic construct
  misc_feature 1..23: note = Synthetic construct
  source 1..23: mol_type = other DNA
tagagctgatccattcagcgacc

SEQ ID NO: 13105 - DNA, 23 bp, synthetic construct
  misc_feature 1..23: note = Synthetic construct
  source 1..23: mol_type = other DNA
agagctgatccattcagcgaccc

SEQ ID NO: 13106 - DNA, 23 bp, synthetic construct
  misc_feature 1..23: note = Synthetic construct
  source 1..23: mol_type = other DNA
gagctgatccattcagcgacccc

SEQ ID NO: 13107 - DNA, 23 bp, synthetic construct
  misc_feature 1..23: note = Synthetic construct
  source 1..23: mol_type = other DNA
agctgatccattcagcgaccccg

SEQ ID NO: 13108 - DNA, 23 bp, synthetic construct
  misc_feature 1..23: note = Synthetic construct
  source 1..23: mol_type = other DNA
gctgatccattcagcgaccccgt

SEQ ID NO: 13109 - DNA, 23 bp, synthetic construct
  misc_feature 1..23: note = Synthetic construct
  source 1..23: mol_type = other DNA
ctgatccattcagcgaccccgtt

SEQ ID NO: 13110 - DNA, 23 bp, synthetic construct
  misc_feature 1..23: note = Synthetic construct
  source 1..23: mol_type = other DNA
tgatccattcagcgaccccgtta

SEQ ID NO: 13111 - DNA, 23 bp, synthetic construct
  misc_feature 1..23: note = Synthetic construct
  source 1..23: mol_type = other DNA
gatccattcagcgaccccgttag

SEQ ID NO: 13112 - DNA, 23 bp, synthetic construct
  misc_feature 1..23: note = Synthetic construct
  source 1..23: mol_type = other DNA
atccattcagcgaccccgttagc

SEQ ID NO: 13113 - DNA, 23 bp, synthetic construct
  misc_feature 1..23: note = Synthetic construct
  source 1..23: mol_type = other DNA
tccattcagcgaccccgttagcg

SEQ ID NO: 13114 - DNA, 23 bp, synthetic construct
  misc_feature 1..23: note = Synthetic construct
  source 1..23: mol_type = other DNA
ccattcagcgaccccgttagcga

SEQ ID NO: 13115 - DNA, 23 bp, synthetic construct
  misc_feature 1..23: note = Synthetic construct
  source 1..23: mol_type = other DNA
cattcagcgaccccgttagcgaa

SEQ ID NO: 13116 - DNA, 23 bp, synthetic construct
  misc_feature 1..23: note = Synthetic construct
  source 1..23: mol_type = other DNA
attcagcgaccccgttagcgaag

SEQ ID NO: 13117 - DNA, 23 bp, synthetic construct
  misc_feature 1..23: note = Synthetic construct
  source 1..23: mol_type = other DNA
ttcagcgaccccgttagcgaagt

SEQ ID NO: 13118 - DNA, 23 bp, synthetic construct
  misc_feature 1..23: note = Synthetic construct
  source 1..23: mol_type = other DNA
tcagcgaccccgttagcgaagtt

SEQ ID NO: 13119 - DNA, 23 bp, synthetic construct
  misc_feature 1..23: note = Synthetic construct
  source 1..23: mol_type = other DNA
cagcgaccccgttagcgaagttg

SEQ ID NO: 13120 - DNA, 23 bp, synthetic construct
  misc_feature 1..23: note = Synthetic construct
  source 1..23: mol_type = other DNA
agcgaccccgttagcgaagttgc

SEQ ID NO: 13121 - DNA, 23 bp, synthetic construct
  misc_feature 1..23: note = Synthetic construct
  source 1..23: mol_type = other DNA
gcgaccccgttagcgaagttgct

SEQ ID NO: 13122 - DNA, 23 bp, synthetic construct
  misc_feature 1..23: note = Synthetic construct
  source 1..23: mol_type = other DNA
cgaccccgttagcgaagttgctt

SEQ ID NO: 13123 - DNA, 23 bp, synthetic construct
  misc_feature 1..23: note = Synthetic construct
  source 1..23: mol_type = other DNA
gaccccgttagcgaagttgcttg

SEQ ID NO: 13124 - DNA, 23 bp, synthetic construct
  misc_feature 1..23: note = Synthetic construct
  source 1..23: mol_type = other DNA
accccgttagcgaagttgcttgg

SEQ ID NO: 13125 - DNA, 23 bp, synthetic construct
  misc_feature 1..23: note = Synthetic construct
  source 1..23: mol_type = other DNA
ccccgttagcgaagttgcttggg

SEQ ID NO: 13126 - DNA, 23 bp, synthetic construct
  misc_feature 1..23: note = Synthetic construct
  source 1..23: mol_type = other DNA
cccgttagcgaagttgcttgggg

SEQ ID NO: 13127 - DNA, 23 bp, synthetic construct
  misc_feature 1..23: note = Synthetic construct
  source 1..23: mol_type = other DNA
ccgttagcgaagttgcttggggc

SEQ ID NO: 13128 - DNA, 23 bp, synthetic construct
  misc_feature 1..23: note = Synthetic construct
  source 1..23: mol_type = other DNA
cgttagcgaagttgcttggggcg

SEQ ID NO: 13129 - DNA, 23 bp, synthetic construct
  misc_feature 1..23: note = Synthetic construct
  source 1..23: mol_type = other DNA
gttagcgaagttgcttggggcga

SEQ ID NO: 13130 - DNA, 23 bp, synthetic construct
  misc_feature 1..23: note = Synthetic construct
  source 1..23: mol_type = other DNA
ttagcgaagttgcttggggcgac

SEQ ID NO: 13131 - DNA, 23 bp, synthetic construct
  misc_feature 1..23: note = Synthetic construct
  source 1..23: mol_type = other DNA
tagcgaagttgcttggggcgaca

SEQ ID NO: 13132 - DNA, 23 bp, synthetic construct
  misc_feature 1..23: note = Synthetic construct
  source 1..23: mol_type = other DNA
agcgaagttgcttggggcgacag

SEQ ID NO: 13133 - DNA, 23 bp, synthetic construct
  misc_feature 1..23: note = Synthetic construct
  source 1..23: mol_type = other DNA
gcgaagttgcttggggcgacagt

SEQ ID NO: 13134 - DNA, 23 bp, synthetic construct
  misc_feature 1..23: note = Synthetic construct
  source 1..23: mol_type = other DNA
cgaagttgcttggggcgacagtc

SEQ ID NO: 13135 - DNA, 23 bp, synthetic construct
  misc_feature 1..23: note = Synthetic construct
  source 1..23: mol_type = other DNA
gaagttgcttggggcgacagtca

SEQ ID NO: 13136 - DNA, 23 bp, synthetic construct
  misc_feature 1..23: note = Synthetic construct
  source 1..23: mol_type = other DNA
aagttgcttggggcgacagtcac

SEQ ID NO: 13137 - DNA, 23 bp, synthetic construct
  misc_feature 1..23: note = Synthetic construct
  source 1..23: mol_type = other DNA
agttgcttggggcgacagtcacg

SEQ ID NO: 13138 - DNA, 23 bp, synthetic construct
  misc_feature 1..23: note = Synthetic construct
  source 1..23: mol_type = other DNA
gttgcttggggcgacagtcacgt

SEQ ID NO: 13139 - DNA, 23 bp, synthetic construct
  misc_feature 1..23: note = Synthetic construct
  source 1..23: mol_type = other DNA
ttgcttggggcgacagtcacgtc

SEQ ID NO: 13140 - DNA, 23 bp, synthetic construct
  misc_feature 1..23: note = Synthetic construct
  source 1..23: mol_type = other DNA
tgcttggggcgacagtcacgtcg

SEQ ID NO: 13141 - DNA, 23 bp, synthetic construct
  misc_feature 1..23: note = Synthetic construct
  source 1..23: mol_type = other DNA
gcttggggcgacagtcacgtcgc

SEQ ID NO: 13142 - DNA, 23 bp, synthetic construct
  misc_feature 1..23: note = Synthetic construct
  source 1..23: mol_type = other DNA
cttggggcgacagtcacgtcgcc

SEQ ID NO: 13143 - DNA, 23 bp, synthetic construct
  misc_feature 1..23: note = Synthetic construct
  source 1..23: mol_type = other DNA
ttggggcgacagtcacgtcgcca

SEQ ID NO: 13144 - DNA, 23 bp, synthetic construct
  misc_feature 1..23: note = Synthetic construct
  source 1..23: mol_type = other DNA
tggggcgacagtcacgtcgccag

SEQ ID NO: 13145 - DNA, 23 bp, synthetic construct
  misc_feature 1..23: note = Synthetic construct
  source 1..23: mol_type = other DNA
ggggcgacagtcacgtcgccagt

SEQ ID NO: 13146 - DNA, 23 bp, synthetic construct
  misc_feature 1..23: note = Synthetic construct
  source 1..23: mol_type = other DNA
gggcgacagtcacgtcgccagtt

SEQ ID NO: 13147 - DNA, 23 bp, synthetic construct
  misc_feature 1..23: note = Synthetic construct
  source 1..23: mol_type = other DNA
ggcgacagtcacgtcgccagttc

SEQ ID NO: 13148 - DNA, 23 bp, synthetic construct
  misc_feature 1..23: note = Synthetic construct
  source 1..23: mol_type = other DNA
gcgacagtcacgtcgccagttcc

SEQ ID NO: 13149 - DNA, 23 bp, synthetic construct
  misc_feature 1..23: note = Synthetic construct
  source 1..23: mol_type = other DNA
cgacagtcacgtcgccagttccg

SEQ ID NO: 13150 - DNA, 23 bp, synthetic construct
  misc_feature 1..23: note = Synthetic construct
  source 1..23: mol_type = other DNA
gacagtcacgtcgccagttccgc

SEQ ID NO: 13151 - DNA, 23 bp, synthetic construct
  misc_feature 1..23: note = Synthetic construct
  source 1..23: mol_type = other DNA
acagtcacgtcgccagttccgcc

SEQ ID NO: 13152 - DNA, 23 bp, synthetic construct
  misc_feature 1..23: note = Synthetic construct
  source 1..23: mol_type = other DNA
cagtcacgtcgccagttccgcca

SEQ ID NO: 13153 - DNA, 23 bp, synthetic construct
  misc_feature 1..23: note = Synthetic construct
  source 1..23: mol_type = other DNA
agtcacgtcgccagttccgccat

SEQ ID NO: 13154 - DNA, 23 bp, synthetic construct
  misc_feature 1..23: note = Synthetic construct
  source 1..23: mol_type = other DNA
gtcacgtcgccagttccgccatt

SEQ ID NO: 13155 - DNA, 23 bp, synthetic construct
  misc_feature 1..23: note = Synthetic construct
  source 1..23: mol_type = other DNA
tcacgtcgccagttccgccattg

SEQ ID NO: 13156 - DNA, 23 bp, synthetic construct
  misc_feature 1..23: note = Synthetic construct
  source 1..23: mol_type = other DNA
cacgtcgccagttccgccattgt

SEQ ID NO: 13157 - DNA, 23 bp, synthetic construct
  misc_feature 1..23: note = Synthetic construct
  source 1..23: mol_type = other DNA
acgtcgccagttccgccattgtc

SEQ ID NO: 13158 - DNA, 23 bp, synthetic construct
  misc_feature 1..23: note = Synthetic construct
  source 1..23: mol_type = other DNA
cgtcgccagttccgccattgtcg

SEQ ID NO: 13159 - DNA, 23 bp, synthetic construct
  misc_feature 1..23: note = Synthetic construct
  source 1..23: mol_type = other DNA
gtcgccagttccgccattgtcga

SEQ ID NO: 13160 - DNA, 23 bp, synthetic construct
  misc_feature 1..23: note = Synthetic construct
  source 1..23: mol_type = other DNA
tcgccagttccgccattgtcgac

SEQ ID NO: 13161 - DNA, 23 bp, synthetic construct
  misc_feature 1..23: note = Synthetic construct
  source 1..23: mol_type = other DNA
cgccagttccgccattgtcgacg

SEQ ID NO: 13162 - DNA, 23 bp, synthetic construct
  misc_feature 1..23: note = Synthetic construct
  source 1..23: mol_type = other DNA
gccagttccgccattgtcgacga

SEQ ID NO: 13163 - DNA, 23 bp, synthetic construct
  misc_feature 1..23: note = Synthetic construct
  source 1..23: mol_type = other DNA
ccagttccgccattgtcgacgag

SEQ ID NO: 13164 - DNA, 23 bp, synthetic construct
  misc_feature 1..23: note = Synthetic construct
  source 1..23: mol_type = other DNA
cagttccgccattgtcgacgaga

SEQ ID NO: 13165 - DNA, 23 bp, synthetic construct
  misc_feature 1..23: note = Synthetic construct
  source 1..23: mol_type = other DNA
agttccgccattgtcgacgagaa

SEQ ID NO: 13166 - DNA, 23 bp, synthetic construct
  misc_feature 1..23: note = Synthetic construct
  source 1..23: mol_type = other DNA
gttccgccattgtcgacgagaac

SEQ ID NO: 13167 - DNA, 23 bp, synthetic construct
  misc_feature 1..23: note = Synthetic construct
  source 1..23: mol_type = other DNA
ttccgccattgtcgacgagaacg

SEQ ID NO: 13168 - DNA, 23 bp, synthetic construct
  misc_feature 1..23: note = Synthetic construct
  source 1..23: mol_type = other DNA
tccgccattgtcgacgagaacga

SEQ ID NO: 13169 - DNA, 23 bp, synthetic construct
  misc_feature 1..23: note = Synthetic construct
  source 1..23: mol_type = other DNA
ccgccattgtcgacgagaacgaa

SEQ ID NO: 13170 - DNA, 23 bp, synthetic construct
  misc_feature 1..23: note = Synthetic construct
  source 1..23: mol_type = other DNA
cgccattgtcgacgagaacgaac

SEQ ID NO: 13171 - DNA, 23 bp, synthetic construct
  misc_feature 1..23: note = Synthetic construct
  source 1..23: mol_type = other DNA
gccattgtcgacgagaacgaact

SEQ ID NO: 13172 - DNA, 23 bp, synthetic construct
  misc_feature 1..23: note = Synthetic construct
  source 1..23: mol_type = other DNA
ccattgtcgacgagaacgaactg

SEQ ID NO: 13173 - DNA, 23 bp, synthetic construct
  misc_feature 1..23: note = Synthetic construct
  source 1..23: mol_type = other DNA
cattgtcgacgagaacgaactga

SEQ ID NO: 13174 - DNA, 23 bp, synthetic construct
  misc_feature 1..23: note = Synthetic construct
  source 1..23: mol_type = other DNA
attgtcgacgagaacgaactgag

SEQ ID NO: 13175 - DNA, 23 bp, synthetic construct
  misc_feature 1..23: note = Synthetic construct
  source 1..23: mol_type = other DNA
ttgtcgacgagaacgaactgagt

SEQ ID NO: 13176 - DNA, 23 bp, synthetic construct
  misc_feature 1..23: note = Synthetic construct
  source 1..23: mol_type = other DNA
tgtcgacgagaacgaactgagta

SEQ ID NO: 13177 - DNA, 23 bp, synthetic construct
  misc_feature 1..23: note = Synthetic construct
  source 1..23: mol_type = other DNA
gtcgacgagaacgaactgagtaa

SEQ ID NO: 13178 - DNA, 23 bp, synthetic construct
  misc_feature 1..23: note = Synthetic construct
  source 1..23: mol_type = other DNA
tcgacgagaacgaactgagtaaa

SEQ ID NO: 13179 - DNA, 23 bp, synthetic construct
  misc_feature 1..23: note = Synthetic construct
  source 1..23: mol_type = other DNA
cgacgagaacgaactgagtaaag

SEQ ID NO: 13180 - DNA, 23 bp, synthetic construct
  misc_feature 1..23: note = Synthetic construct
  source 1..23: mol_type = other DNA
gacgagaacgaactgagtaaagt

SEQ ID NO: 13181 - DNA, 23 bp, synthetic construct
  misc_feature 1..23: note = Synthetic construct
  source 1..23: mol_type = other DNA
acgagaacgaactgagtaaagtt

SEQ ID NO: 13182 - DNA, 23 bp, synthetic construct
  misc_feature 1..23: note = Synthetic construct
  source 1..23: mol_type = other DNA
cgagaacgaactgagtaaagtta

SEQ ID NO: 13183 - DNA, 23 bp, synthetic construct
  misc_feature 1..23: note = Synthetic construct
  source 1..23: mol_type = other DNA
gagaacgaactgagtaaagttag

SEQ ID NO: 13184 - DNA, 23 bp, synthetic construct
  misc_feature 1..23: note = Synthetic construct
  source 1..23: mol_type = other DNA
agaacgaactgagtaaagttaga

SEQ ID NO: 13185 - DNA, 23 bp, synthetic construct
  misc_feature 1..23: note = Synthetic construct
  source 1..23: mol_type = other DNA
gaacgaactgagtaaagttagaa

SEQ ID NO: 13186 - DNA, 23 bp, synthetic construct
  misc_feature 1..23: note = Synthetic construct
  source 1..23: mol_type = other DNA
aacgaactgagtaaagttagaag

SEQ ID NO: 13187 - DNA, 23 bp, synthetic construct
  misc_feature 1..23: note = Synthetic construct
  source 1..23: mol_type = other DNA
acgaactgagtaaagttagaagc

SEQ ID NO: 13188 - DNA, 23 bp, synthetic construct
  misc_feature 1..23: note = Synthetic construct
  source 1..23: mol_type = other DNA
cgaactgagtaaagttagaagcc

SEQ ID NO: 13189 - DNA, 23 bp, synthetic construct
  misc_feature 1..23: note = Synthetic construct
  source 1..23: mol_type = other DNA
gaactgagtaaagttagaagcca

SEQ ID NO: 13190 - DNA, 23 bp, synthetic construct
  misc_feature 1..23: note = Synthetic construct
  source 1..23: mol_type = other DNA
aactgagtaaagttagaagccat

SEQ ID NO: 13191 - DNA, 23 bp, synthetic construct
  misc_feature 1..23: note = Synthetic construct
  source 1..23: mol_type = other DNA
actgagtaaagttagaagccatg

SEQ ID NO: 13192 - DNA, 23 bp, synthetic construct
  misc_feature 1..23: note = Synthetic construct
  source 1..23: mol_type = other DNA
ctgagtaaagttagaagccatgc

SEQ ID NO: 13193 - DNA, 23 bp, synthetic construct
  misc_feature 1..23: note = Synthetic construct
  source 1..23: mol_type = other DNA
tgagtaaagttagaagccatgct

SEQ ID NO: 13194 - DNA, 23 bp, synthetic construct
  misc_feature 1..23: note = Synthetic construct
  source 1..23: mol_type = other DNA
gagtaaagttagaagccatgctt

SEQ ID NO: 13195 - DNA, 23 bp, synthetic construct
  misc_feature 1..23: note = Synthetic construct
  source 1..23: mol_type = other DNA
agtaaagttagaagccatgcttc

SEQ ID NO: 13196 - DNA, 23 bp, synthetic construct
  misc_feature 1..23: note = Synthetic construct
  source 1..23: mol_type = other DNA
gtaaagttagaagccatgcttca

SEQ ID NO: 13197 - DNA, 23 bp, synthetic construct
  misc_feature 1..23: note = Synthetic construct
  source 1..23: mol_type = other DNA
taaagttagaagccatgcttcaa

SEQ ID NO: 13198 - DNA, 23 bp, synthetic construct
  misc_feature 1..23: note = Synthetic construct
  source 1..23: mol_type = other DNA
aaagttagaagccatgcttcaaa

SEQ ID NO: 13199 - DNA, 23 bp, synthetic construct
  misc_feature 1..23: note = Synthetic construct
  source 1..23: mol_type = other DNA
aagttagaagccatgcttcaaac

SEQ ID NO: 13200 - DNA, 23 bp, synthetic construct
  misc_feature 1..23: note = Synthetic construct
  source 1..23: mol_type = other DNA
agttagaagccatgcttcaaact

SEQ ID NO: 13201 - DNA, 23 bp, synthetic construct
  misc_feature 1..23: note = Synthetic construct
  source 1..23: mol_type = other DNA
gttagaagccatgcttcaaactc

SEQ ID NO: 13202 - DNA, 23 bp, synthetic construct
  misc_feature 1..23: note = Synthetic construct
  source 1..23: mol_type = other DNA
ttagaagccatgcttcaaactcc

SEQ ID NO: 13203 - DNA, 23 bp, synthetic construct
  misc_feature 1..23: note = Synthetic construct
  source 1..23: mol_type = other DNA
tagaagccatgcttcaaactccg

SEQ ID NO: 13204 - DNA, 23 bp, synthetic construct
  misc_feature 1..23: note = Synthetic construct
  source 1..23: mol_type = other DNA
agaagccatgcttcaaactccgg

SEQ ID NO: 13205 - DNA, 23 bp, synthetic construct
  misc_feature 1..23: note = Synthetic construct
  source 1..23: mol_type = other DNA
gaagccatgcttcaaactccggt

SEQ ID NO: 13206 - DNA, 23 bp, synthetic construct
  misc_feature 1..23: note = Synthetic construct
  source 1..23: mol_type = other DNA
aagccatgcttcaaactccggtt

SEQ ID NO: 13207 - DNA, 23 bp, synthetic construct
  misc_feature 1..23: note = Synthetic construct
  source 1..23: mol_type = other DNA
agccatgcttcaaactccggttg

SEQ ID NO: 13208 - DNA, 23 bp, synthetic construct
  misc_feature 1..23: note = Synthetic construct
  source 1..23: mol_type = other DNA
gccatgcttcaaactccggttga

SEQ ID NO: 13209 - DNA, 23 bp, synthetic construct
  misc_feature 1..23: note = Synthetic construct
  source 1..23: mol_type = other DNA
ccatgcttcaaactccggttgag

SEQ ID NO: 13210 - DNA, 23 bp, synthetic construct
  misc_feature 1..23: note = Synthetic construct
  source 1..23: mol_type = other DNA
catgcttcaaactccggttgagg

SEQ ID NO: 13211 - DNA, 23 bp, synthetic construct
  misc_feature 1..23: note = Synthetic construct
  source 1..23: mol_type = other DNA
atgcttcaaactccggttgaggg

SEQ ID NO: 13212 - DNA, 23 bp, synthetic construct
  misc_feature 1..23: note = Synthetic construct
  source 1..23: mol_type = other DNA
tgcttcaaactccggttgagggc

SEQ ID NO: 13213 - DNA, 23 bp, synthetic construct
  misc_feature 1..23: note = Synthetic construct
  source 1..23: mol_type = other DNA
gcttcaaactccggttgagggct

SEQ ID NO: 13214 - DNA, 23 bp, synthetic construct
  misc_feature 1..23: note = Synthetic construct
  source 1..23: mol_type = other DNA
cttcaaactccggttgagggctc

SEQ ID NO: 13215 - DNA, 23 bp, synthetic construct
  misc_feature 1..23: note = Synthetic construct
  source 1..23: mol_type = other DNA
ttcaaactccggttgagggctct

SEQ ID NO: 13216 - DNA, 23 bp, synthetic construct
  misc_feature 1..23: note = Synthetic construct
  source 1..23: mol_type = other DNA
tcaaactccggttgagggctcta

SEQ ID NO: 13217 - DNA, 23 bp, synthetic construct
  misc_feature 1..23: note = Synthetic construct
  source 1..23: mol_type = other DNA
caaactccggttgagggctctat

SEQ ID NO: 13218 - DNA, 23 bp, synthetic construct
  misc_feature 1..23: note = Synthetic construct
  source 1..23: mol_type = other DNA
aaactccggttgagggctctatc

SEQ ID NO: 13219 - DNA, 23 bp, synthetic construct
  misc_feature 1..23: note = Synthetic construct
  source 1..23: mol_type = other DNA
aactccggttgagggctctatct

SEQ ID NO: 13220 - DNA, 23 bp, synthetic construct
  misc_feature 1..23: note = Synthetic construct
  source 1..23: mol_type = other DNA
actccggttgagggctctatcta

SEQ ID NO: 13221 - DNA, 23 bp, synthetic construct
  misc_feature 1..23: note = Synthetic construct
  source 1..23: mol_type = other DNA
ctccggttgagggctctatctag

SEQ ID NO: 13222 - DNA, 23 bp, synthetic construct
  misc_feature 1..23: note = Synthetic construct
  source 1..23: mol_type = other DNA
tccggttgagggctctatctaga

SEQ ID NO: 13223 - DNA, 23 bp, synthetic construct
  misc_feature 1..23: note = Synthetic construct
  source 1..23: mol_type = other DNA
ccggttgagggctctatctagag

SEQ ID NO: 13224 - DNA, 23 bp, synthetic construct
  misc_feature 1..23: note = Synthetic construct
  source 1..23: mol_type = other DNA
cggttgagggctctatctagaga

SEQ ID NO: 13225 - DNA, 23 bp, synthetic construct
  misc_feature 1..23: note = Synthetic construct
  source 1..23: mol_type = other DNA
ggttgagggctctatctagagag

SEQ ID NO: 13226 - DNA, 23 bp, synthetic construct
  misc_feature 1..23: note = Synthetic construct
  source 1..23: mol_type = other DNA
gttgagggctctatctagagagc

SEQ ID NO: 13227 - DNA, 23 bp, synthetic construct
  misc_feature 1..23: note = Synthetic construct
  source 1..23: mol_type = other DNA
ttgagggctctatctagagagcc

SEQ ID NO: 13228 - DNA, 23 bp, synthetic construct
  misc_feature 1..23: note = Synthetic construct
  source 1..23: mol_type = other DNA
tgagggctctatctagagagccg

SEQ ID NO: 13229 - DNA, 23 bp, synthetic construct
  misc_feature 1..23: note = Synthetic construct
  source 1..23: mol_type = other DNA
gagggctctatctagagagccgt

SEQ ID NO: 13230 - DNA, 23 bp, synthetic construct
  misc_feature 1..23: note = Synthetic construct
  source 1..23: mol_type = other DNA
agggctctatctagagagccgtt

SEQ ID NO: 13231 - DNA, 23 bp, synthetic construct
  misc_feature 1..23: note = Synthetic construct
  source 1..23: mol_type = other DNA
gggctctatctagagagccgttg

SEQ ID NO: 13232 - DNA, 23 bp, synthetic construct
  misc_feature 1..23: note = Synthetic construct
  source 1..23: mol_type = other DNA
ggctctatctagagagccgttgc

SEQ ID NO: 13233 - DNA, 23 bp, synthetic construct
  misc_feature 1..23: note = Synthetic construct
  source 1..23: mol_type = other DNA
gctctatctagagagccgttgcc

SEQ ID NO: 13234 - DNA, 23 bp, synthetic construct
  misc_feature 1..23: note = Synthetic construct
  source 1..23: mol_type = other DNA
ctctatctagagagccgttgcct

SEQ ID NO: 13235 - DNA, 23 bp, synthetic construct
  misc_feature 1..23: note = Synthetic construct
  source 1..23: mol_type = other DNA
tctatctagagagccgttgcctg

SEQ ID NO: 13236 - DNA, 23 bp, synthetic construct
  misc_feature 1..23: note = Synthetic construct
  source 1..23: mol_type = other DNA
ctatctagagagccgttgcctga

SEQ ID NO: 13237 - DNA, 23 bp, synthetic construct
  misc_feature 1..23: note = Synthetic construct
  source 1..23: mol_type = other DNA
tatctagagagccgttgcctgat

SEQ ID NO: 13238 - DNA, 23 bp, synthetic construct
  misc_feature 1..23: note = Synthetic construct
  source 1..23: mol_type = other DNA
atctagagagccgttgcctgatt

SEQ ID NO: 13239 - DNA, 23 bp, synthetic construct
  misc_feature 1..23: note = Synthetic construct
  source 1..23: mol_type = other DNA
tctagagagccgttgcctgatta

SEQ ID NO: 13240 - DNA, 23 bp, synthetic construct
  misc_feature 1..23: note = Synthetic construct
  source 1..23: mol_type = other DNA
ctagagagccgttgcctgattaa

SEQ ID NO: 13241 - DNA, 23 bp, synthetic construct
  misc_feature 1..23: note = Synthetic construct
  source 1..23: mol_type = other DNA
tagagagccgttgcctgattaat

SEQ ID NO: 13242 - DNA, 23 bp, synthetic construct
  misc_feature 1..23: note = Synthetic construct
  source 1..23: mol_type = other DNA
agagagccgttgcctgattaatg

SEQ ID NO: 13243 - DNA, 23 bp, synthetic construct
  misc_feature 1..23: note = Synthetic construct
  source 1..23: mol_type = other DNA
gagagccgttgcctgattaatgc

SEQ ID NO: 13244 - DNA, 23 bp, synthetic construct
  misc_feature 1..23: note = Synthetic construct
  source 1..23: mol_type = other DNA
agagccgttgcctgattaatgct

SEQ ID NO: 13245 - DNA, 23 bp, synthetic construct
  misc_feature 1..23: note = Synthetic construct
  source 1..23: mol_type = other DNA
gagccgttgcctgattaatgcta

SEQ ID NO: 13246 - DNA, 23 bp, synthetic construct
  misc_feature 1..23: note = Synthetic construct
  source 1..23: mol_type = other DNA
agccgttgcctgattaatgctaa

SEQ ID NO: 13247 - DNA, 23 bp, synthetic construct
  misc_feature 1..23: note = Synthetic construct
  source 1..23: mol_type = other DNA
gccgttgcctgattaatgctaac

SEQ ID NO: 13248 - DNA, 23 bp, synthetic construct
  misc_feature 1..23: note = Synthetic construct
  source 1..23: mol_type = other DNA
ccgttgcctgattaatgctaacg

SEQ ID NO: 13249 - DNA, 23 bp, synthetic construct
  misc_feature 1..23: note = Synthetic construct
  source 1..23: mol_type = other DNA
cgttgcctgattaatgctaacgc

SEQ ID NO: 13250 - DNA, 23 bp, synthetic construct
  misc_feature 1..23: note = Synthetic construct
  source 1..23: mol_type = other DNA
gttgcctgattaatgctaacgca

SEQ ID NO: 13251 - DNA, 23 bp, synthetic construct
  misc_feature 1..23: note = Synthetic construct
  source 1..23: mol_type = other DNA
ttgcctgattaatgctaacgcat

SEQ ID NO: 13252 - DNA, 23 bp, synthetic construct
  misc_feature 1..23: note = Synthetic construct
  source 1..23: mol_type = other DNA
tgcctgattaatgctaacgcatc

SEQ ID NO: 13253 - DNA, 23 bp, synthetic construct
  misc_feature 1..23: note = Synthetic construct
  source 1..23: mol_type = other DNA
gcctgattaatgctaacgcatct

SEQ ID NO: 13254 - DNA, 23 bp, synthetic construct
  misc_feature 1..23: note = Synthetic construct
  source 1..23: mol_type = other DNA
cctgattaatgctaacgcatcta

SEQ ID NO: 13255 - DNA, 23 bp, synthetic construct
  misc_feature 1..23: note = Synthetic construct
  source 1..23: mol_type = other DNA
ctgattaatgctaacgcatctaa

SEQ ID NO: 13256 - DNA, 23 bp, synthetic construct
  misc_feature 1..23: note = Synthetic construct
  source 1..23: mol_type = other DNA
tgattaatgctaacgcatctaag

SEQ ID NO: 13257 - DNA, 23 bp, synthetic construct
  misc_feature 1..23: note = Synthetic construct
  source 1..23: mol_type = other DNA
gattaatgctaacgcatctaagg

SEQ ID NO: 13258 - DNA, 23 bp, synthetic construct
  misc_feature 1..23: note = Synthetic construct
  source 1..23: mol_type = other DNA
attaatgctaacgcatctaaggt

SEQ ID NO: 13259 - DNA, 23 bp, synthetic construct
  misc_feature 1..23: note = Synthetic construct
  source 1..23: mol_type = other DNA
ttaatgctaacgcatctaaggta

SEQ ID NO: 13260 - DNA, 23 bp, synthetic construct
  misc_feature 1..23: note = Synthetic construct
  source 1..23: mol_type = other DNA
taatgctaacgcatctaaggtat

SEQ ID NO: 13261 - DNA, 23 bp, synthetic construct
  misc_feature 1..23: note = Synthetic construct
  source 1..23: mol_type = other DNA
aatgctaacgcatctaaggtatg

SEQ ID NO: 13262 - DNA, 23 bp, synthetic construct
  misc_feature 1..23: note = Synthetic construct
  source 1..23: mol_type = other DNA
atgctaacgcatctaaggtatgg

SEQ ID NO: 13263 - DNA, 23 bp, synthetic construct
  misc_feature 1..23: note = Synthetic construct
  source 1..23: mol_type = other DNA
tgctaacgcatctaaggtatgga

SEQ ID NO: 13264 - DNA, 23 bp, synthetic construct
  misc_feature 1..23: note = Synthetic construct
  source 1..23: mol_type = other DNA
gctaacgcatctaaggtatggac

SEQ ID NO: 13265 - DNA, 23 bp, synthetic construct
  misc_feature 1..23: note = Synthetic construct
  source 1..23: mol_type = other DNA
ctaacgcatctaaggtatggacc

SEQ ID NO: 13266 - DNA, 23 bp, synthetic construct
  misc_feature 1..23: note = Synthetic construct
  source 1..23: mol_type = other DNA
taacgcatctaaggtatggacca

SEQ ID NO: 13267 - DNA, 23 bp, synthetic construct
  misc_feature 1..23: note = Synthetic construct
  source 1..23: mol_type = other DNA
aacgcatctaaggtatggaccat

SEQ ID NO: 13268 - DNA, 23 bp, synthetic construct
  misc_feature 1..23: note = Synthetic construct
  source 1..23: mol_type = other DNA
acgcatctaaggtatggaccatc

SEQ ID NO: 13269 - DNA, 23 bp, synthetic construct
  misc_feature 1..23: note = Synthetic construct
  source 1..23: mol_type = other DNA
cgcatctaaggtatggaccatcg

SEQ ID NO: 13270 - DNA, 23 bp, synthetic construct
  misc_feature 1..23: note = Synthetic construct
  source 1..23: mol_type = other DNA
gcatctaaggtatggaccatcga

SEQ ID NO: 13271 - DNA, 23 bp, synthetic construct
  misc_feature 1..23: note = Synthetic construct
  source 1..23: mol_type = other DNA
catctaaggtatggaccatcgag

SEQ ID NO: 13272 - DNA, 23 bp, synthetic construct
  misc_feature 1..23: note = Synthetic construct
  source 1..23: mol_type = other DNA
atctaaggtatggaccatcgaga

SEQ ID NO: 13273 - DNA, 23 bp, synthetic construct
  misc_feature 1..23: note = Synthetic construct
  source 1..23: mol_type = other DNA
tctaaggtatggaccatcgagaa

SEQ ID NO: 13274 - DNA, 23 bp, synthetic construct
  misc_feature 1..23: note = Synthetic construct
  source 1..23: mol_type = other DNA
ctaaggtatggaccatcgagaaa

SEQ ID NO: 13275 - DNA, 23 bp, synthetic construct
  misc_feature 1..23: note = Synthetic construct
  source 1..23: mol_type = other DNA
taaggtatggaccatcgagaaag

SEQ ID NO: 13276 - DNA, 23 bp, synthetic construct
  misc_feature 1..23: note = Synthetic construct
  source 1..23: mol_type = other DNA
aaggtatggaccatcgagaaagg

SEQ ID NO: 13277 - DNA, 23 bp, synthetic construct
  misc_feature 1..23: note = Synthetic construct
  source 1..23: mol_type = other DNA
aggtatggaccatcgagaaagga

SEQ ID NO: 13278 - DNA, 23 bp, synthetic construct
  misc_feature 1..23: note = Synthetic construct
  source 1..23: mol_type = other DNA
ggtatggaccatcgagaaaggag

SEQ ID NO: 13279 - DNA, 23 bp, synthetic construct
  misc_feature 1..23: note = Synthetic construct
  source 1..23: mol_type = other DNA
gtatggaccatcgagaaaggaga

SEQ ID NO: 13280 - DNA, 23 bp, synthetic construct
  misc_feature 1..23: note = Synthetic construct
  source 1..23: mol_type = other DNA
tatggaccatcgagaaaggagac

SEQ ID NO: 13281 - DNA, 23 bp, synthetic construct
  misc_feature 1..23: note = Synthetic construct
  source 1..23: mol_type = other DNA
atggaccatcgagaaaggagact

SEQ ID NO: 13282 - DNA, 23 bp, synthetic construct
  misc_feature 1..23: note = Synthetic construct
  source 1..23: mol_type = other DNA
tggaccatcgagaaaggagactt

SEQ ID NO: 13283 - DNA, 23 bp, synthetic construct
  misc_feature 1..23: note = Synthetic construct
  source 1..23: mol_type = other DNA
ggaccatcgagaaaggagacttt

SEQ ID NO: 13284 - DNA, 23 bp, synthetic construct
  misc_feature 1..23: note = Synthetic construct
  source 1..23: mol_type = other DNA
gaccatcgagaaaggagacttta

SEQ ID NO: 13285 - DNA, 23 bp, synthetic construct
  misc_feature 1..23: note = Synthetic construct
  source 1..23: mol_type = other DNA
accatcgagaaaggagactttac

SEQ ID NO: 13286 - DNA, 23 bp, synthetic construct
  misc_feature 1..23: note = Synthetic construct
  source 1..23: mol_type = other DNA
ccatcgagaaaggagactttacg

SEQ ID NO: 13287 - DNA, 23 bp, synthetic construct
  misc_feature 1..23: note = Synthetic construct
  source 1..23: mol_type = other DNA
catcgagaaaggagactttacgt

SEQ ID NO: 13288 - DNA, 23 bp, synthetic construct
  misc_feature 1..23: note = Synthetic construct
  source 1..23: mol_type = other DNA
atcgagaaaggagactttacgta

SEQ ID NO: 13289 - DNA, 23 bp, synthetic construct
  misc_feature 1..23: note = Synthetic construct
  source 1..23: mol_type = other DNA
tcgagaaaggagactttacgtac

SEQ ID NO: 13290 - DNA, 23 bp, synthetic construct
  misc_feature 1..23: note = Synthetic construct
  source 1..23: mol_type = other DNA
cgagaaaggagactttacgtacg

SEQ ID NO: 13291 - DNA, 23 bp, synthetic construct
  misc_feature 1..23: note = Synthetic construct
  source 1..23: mol_type = other DNA
gagaaaggagactttacgtacgc

SEQ ID NO: 13292 - DNA, 23 bp, synthetic construct
  misc_feature 1..23: note = Synthetic construct
  source 1..23: mol_type = other DNA
agaaaggagactttacgtacgcg

SEQ ID NO: 13293 - DNA, 23 bp, synthetic construct
  misc_feature 1..23: note = Synthetic construct
  source 1..23: mol_type = other DNA
gaaaggagactttacgtacgcgc

SEQ ID NO: 13294 - DNA, 23 bp, synthetic construct
  misc_feature 1..23: note = Synthetic construct
  source 1..23: mol_type = other DNA
aaaggagactttacgtacgcgcc

SEQ ID NO: 13295 - DNA, 23 bp, synthetic construct
  misc_feature 1..23: note = Synthetic construct
  source 1..23: mol_type = other DNA
aaggagactttacgtacgcgcca

SEQ ID NO: 13296 - DNA, 23 bp, synthetic construct
  misc_feature 1..23: note = Synthetic construct
  source 1..23: mol_type = other DNA
aggagactttacgtacgcgccag

SEQ ID NO: 13297 - DNA, 23 bp, synthetic construct
  misc_feature 1..23: note = Synthetic construct
  source 1..23: mol_type = other DNA
ggagactttacgtacgcgccagt

SEQ ID NO: 13298 - DNA, 23 bp, synthetic construct
  misc_feature 1..23: note = Synthetic construct
  source 1..23: mol_type = other DNA
gagactttacgtacgcgccagtt

SEQ ID NO: 13299 - DNA, 23 bp, synthetic construct
  misc_feature 1..23: note = Synthetic construct
  source 1..23: mol_type = other DNA
agactttacgtacgcgccagttg

SEQ ID NO: 13300 - DNA, 23 bp, synthetic construct
  misc_feature 1..23: note = Synthetic construct
  source 1..23: mol_type = other DNA
gactttacgtacgcgccagttgt

SEQ ID NO: 13301 - DNA, 23 bp, synthetic construct
  misc_feature 1..23: note = Synthetic construct
  source 1..23: mol_type = other DNA
actttacgtacgcgccagttgtt

SEQ ID NO: 13302 - DNA, 23 bp, synthetic construct
  misc_feature 1..23: note = Synthetic construct
  source 1..23: mol_type = other DNA
ctttacgtacgcgccagttgttg

SEQ ID NO: 13303 - DNA, 23 bp, synthetic construct
  misc_feature 1..23: note = Synthetic construct
  source 1..23: mol_type = other DNA
tttacgtacgcgccagttgttgg

SEQ ID NO: 13304 - DNA, 23 bp, synthetic construct
  misc_feature 1..23: note = Synthetic construct
  source 1..23: mol_type = other DNA
ttacgtacgcgccagttgttggc

SEQ ID NO: 13305 - DNA, 23 bp, synthetic construct
  misc_feature 1..23: note = Synthetic construct
  source 1..23: mol_type = other DNA
tacgtacgcgccagttgttggcc

SEQ ID NO: 13306 - DNA, 23 bp, synthetic construct
  misc_feature 1..23: note = Synthetic construct
  source 1..23: mol_type = other DNA
acgtacgcgccagttgttggcca

SEQ ID NO: 13307 - DNA, 23 bp, synthetic construct
  misc_feature 1..23: note = Synthetic construct
  source 1..23: mol_type = other DNA
cgtacgcgccagttgttggccat

SEQ ID NO: 13308 - DNA, 23 bp, synthetic construct
  misc_feature 1..23: note = Synthetic construct
  source 1..23: mol_type = other DNA
gtacgcgccagttgttggccata

SEQ ID NO: 13309 - DNA, 23 bp, synthetic construct
  misc_feature 1..23: note = Synthetic construct
  source 1..23: mol_type = other DNA
tacgcgccagttgttggccatac

SEQ ID NO: 13310 - DNA, 23 bp, synthetic construct
  misc_feature 1..23: note = Synthetic construct
  source 1..23: mol_type = other DNA
acgcgccagttgttggccatacg

SEQ ID NO: 13311 - DNA, 23 bp, synthetic construct
  misc_feature 1..23: note = Synthetic construct
  source 1..23: mol_type = other DNA
cgcgccagttgttggccatacgg

SEQ ID NO: 13312 - DNA, 23 bp, synthetic construct
  misc_feature 1..23: note = Synthetic construct
  source 1..23: mol_type = other DNA
gcgccagttgttggccatacgga

SEQ ID NO: 13313 - DNA, 23 bp, synthetic construct
  misc_feature 1..23: note = Synthetic construct
  source 1..23: mol_type = other DNA
cgccagttgttggccatacggat

SEQ ID NO: 13314 - DNA, 23 bp, synthetic construct
  misc_feature 1..23: note = Synthetic construct
  source 1..23: mol_type = other DNA
gccagttgttggccatacggatt

SEQ ID NO: 13315 - DNA, 23 bp, synthetic construct
  misc_feature 1..23: note = Synthetic construct
  source 1..23: mol_type = other DNA
ccagttgttggccatacggattg

SEQ ID NO: 13316 - DNA, 23 bp, synthetic construct
  misc_feature 1..23: note = Synthetic construct
  source 1..23: mol_type = other DNA
cagttgttggccatacggattgt

SEQ ID NO: 13317 - DNA, 23 bp, synthetic construct
  misc_feature 1..23: note = Synthetic construct
  source 1..23: mol_type = other DNA
agttgttggccatacggattgta

SEQ ID NO: 13318 - DNA, 23 bp, synthetic construct
  misc_feature 1..23: note = Synthetic construct
  source 1..23: mol_type = other DNA
gttgttggccatacggattgtac

SEQ ID NO: 13319 - DNA, 23 bp, synthetic construct
  misc_feature 1..23: note = Synthetic construct
  source 1..23: mol_type = other DNA
ttgttggccatacggattgtacc

SEQ ID NO: 13320 - DNA, 23 bp, synthetic construct
  misc_feature 1..23: note = Synthetic construct
  source 1..23: mol_type = other DNA
tgttggccatacggattgtaccc

SEQ ID NO: 13321 - DNA, 23 bp, synthetic construct
  misc_feature 1..23: note = Synthetic construct
  source 1..23: mol_type = other DNA
gttggccatacggattgtacccc

SEQ ID NO: 13322 - DNA, 23 bp, synthetic construct
  misc_feature 1..23: note = Synthetic construct
  source 1..23: mol_type = other DNA
ttggccatacggattgtacccct

SEQ ID NO: 13323 - DNA, 23 bp, synthetic construct
  misc_feature 1..23: note = Synthetic construct
  source 1..23: mol_type = other DNA
tggccatacggattgtacccctc

SEQ ID NO: 13324 - DNA, 23 bp, synthetic construct
  misc_feature 1..23: note = Synthetic construct
  source 1..23: mol_type = other DNA
ggccatacggattgtacccctcg

SEQ ID NO: 13325 - DNA, 23 bp, synthetic construct
  misc_feature 1..23: note = Synthetic construct
  source 1..23: mol_type = other DNA
gccatacggattgtacccctcga

SEQ ID NO: 13326 - DNA, 23 bp, synthetic construct
  misc_feature 1..23: note = Synthetic construct
  source 1..23: mol_type = other DNA
ccatacggattgtacccctcgat

SEQ ID NO: 13327 - DNA, 23 bp, synthetic construct
  misc_feature 1..23: note = Synthetic construct
  source 1..23: mol_type = other DNA
catacggattgtacccctcgatg

SEQ ID NO: 13328 - DNA, 23 bp, synthetic construct
  misc_feature 1..23: note = Synthetic construct
  source 1..23: mol_type = other DNA
atacggattgtacccctcgatgc

SEQ ID NO: 13329 - DNA, 23 bp, synthetic construct
  misc_feature 1..23: note = Synthetic construct
  source 1..23: mol_type = other DNA
tacggattgtacccctcgatgca

SEQ ID NO: 13330 - DNA, 23 bp, synthetic construct
  misc_feature 1..23: note = Synthetic construct
  source 1..23: mol_type = other DNA
acggattgtacccctcgatgcat

SEQ ID NO: 13331 - DNA, 23 bp, synthetic construct
  misc_feature 1..23: note = Synthetic construct
  source 1..23: mol_type = other DNA
cggattgtacccctcgatgcatg

SEQ ID NO: 13332 - DNA, 23 bp, synthetic construct
  misc_feature 1..23: note = Synthetic construct
  source 1..23: mol_type = other DNA
ggattgtacccctcgatgcatgg

SEQ ID NO: 13333 - DNA, 23 bp, synthetic construct
  misc_feature 1..23: note = Synthetic construct
  source 1..23: mol_type = other DNA
gattgtacccctcgatgcatggc

SEQ ID NO: 13334 - DNA, 23 bp, synthetic construct
  misc_feature 1..23: note = Synthetic construct
  source 1..23: mol_type = other DNA
attgtacccctcgatgcatggct

SEQ ID NO: 13335 - DNA, 23 bp, synthetic construct
  misc_feature 1..23: note = Synthetic construct
  source 1..23: mol_type = other DNA
ttgtacccctcgatgcatggctg

SEQ ID NO: 13336 - DNA, 23 bp, synthetic construct
  misc_feature 1..23: note = Synthetic construct
  source 1..23: mol_type = other DNA
tgtacccctcgatgcatggctga

SEQ ID NO: 13337 - DNA, 23 bp, synthetic construct
  misc_feature 1..23: note = Synthetic construct
  source 1..23: mol_type = other DNA
gtacccctcgatgcatggctgag

SEQ ID NO: 13338 - DNA, 23 bp, synthetic construct
  misc_feature 1..23: note = Synthetic construct
  source 1..23: mol_type = other DNA
tacccctcgatgcatggctgaga

SEQ ID NO: 13339 - DNA, 23 bp, synthetic construct
  misc_feature 1..23: note = Synthetic construct
  source 1..23: mol_type = other DNA
acccctcgatgcatggctgagat

SEQ ID NO: 13340 - DNA, 23 bp, synthetic construct
  misc_feature 1..23: note = Synthetic construct
  source 1..23: mol_type = other DNA
cccctcgatgcatggctgagatt

SEQ ID NO: 13341 - DNA, 23 bp, synthetic construct
  misc_feature 1..23: note = Synthetic construct
  source 1..23: mol_type = other DNA
ccctcgatgcatggctgagattt

SEQ ID NO: 13342 - DNA, 23 bp, synthetic construct
  misc_feature 1..23: note = Synthetic construct
  source 1..23: mol_type = other DNA
cctcgatgcatggctgagatttg

SEQ ID NO: 13343 - DNA, 23 bp, synthetic construct
  misc_feature 1..23: note = Synthetic construct
  source 1..23: mol_type = other DNA
ctcgatgcatggctgagatttgg

SEQ ID NO: 13344 - DNA, 23 bp, synthetic construct
  misc_feature 1..23: note = Synthetic construct
  source 1..23: mol_type = other DNA
tcgatgcatggctgagatttggg

SEQ ID NO: 13345 - DNA, 23 bp, synthetic construct
  misc_feature 1..23: note = Synthetic construct
  source 1..23: mol_type = other DNA
cgatgcatggctgagatttgggc

SEQ ID NO: 13346 - DNA, 23 bp, synthetic construct
  misc_feature 1..23: note = Synthetic construct
  source 1..23: mol_type = other DNA
gatgcatggctgagatttgggcc

SEQ ID NO: 13347 - DNA, 23 bp, synthetic construct
  misc_feature 1..23: note = Synthetic construct
  source 1..23: mol_type = other DNA
atgcatggctgagatttgggcct

SEQ ID NO: 13348 - DNA, 23 bp, synthetic construct
  misc_feature 1..23: note = Synthetic construct
  source 1..23: mol_type = other DNA
tgcatggctgagatttgggcctt

SEQ ID NO: 13349 - DNA, 23 bp, synthetic construct
  misc_feature 1..23: note = Synthetic construct
  source 1..23: mol_type = other DNA
gcatggctgagatttgggcctta

SEQ ID NO: 13350 - DNA, 23 bp, synthetic construct
  misc_feature 1..23: note = Synthetic construct
  source 1..23: mol_type = other DNA
catggctgagatttgggccttag

SEQ ID NO: 13351 - DNA, 23 bp, synthetic construct
  misc_feature 1..23: note = Synthetic construct
  source 1..23: mol_type = other DNA
atggctgagatttgggccttagc

SEQ ID NO: 13352 - DNA, 23 bp, synthetic construct
  misc_feature 1..23: note = Synthetic construct
  source 1..23: mol_type = other DNA
tggctgagatttgggccttagca

SEQ ID NO: 13353 - DNA, 23 bp, synthetic construct
  misc_feature 1..23: note = Synthetic construct
  source 1..23: mol_type = other DNA
ggctgagatttgggccttagcag

SEQ ID NO: 13354 - DNA, 23 bp, synthetic construct
  misc_feature 1..23: note = Synthetic construct
  source 1..23: mol_type = other DNA
gctgagatttgggccttagcagt

SEQ ID NO: 13355 - DNA, 23 bp, synthetic construct
  misc_feature 1..23: note = Synthetic construct
  source 1..23: mol_type = other DNA
ctgagatttgggccttagcagtg

SEQ ID NO: 13356 - DNA, 23 bp, synthetic construct
  misc_feature 1..23: note = Synthetic construct
  source 1..23: mol_type = other DNA
tgagatttgggccttagcagtgc

SEQ ID NO: 13357 - DNA, 23 bp, synthetic construct
  misc_feature 1..23: note = Synthetic construct
  source 1..23: mol_type = other DNA
gagatttgggccttagcagtgcc

SEQ ID NO: 13358 - DNA, 23 bp, synthetic construct
  misc_feature 1..23: note = Synthetic construct
  source 1..23: mol_type = other DNA
agatttgggccttagcagtgccc

SEQ ID NO: 13359 - DNA, 23 bp, synthetic construct
  misc_feature 1..23: note = Synthetic construct
  source 1..23: mol_type = other DNA
gatttgggccttagcagtgccct

SEQ ID NO: 13360 - DNA, 23 bp, synthetic construct
  misc_feature 1..23: note = Synthetic construct
  source 1..23: mol_type = other DNA
atttgggccttagcagtgccctg

SEQ ID NO: 13361 - DNA, 23 bp, synthetic construct
  misc_feature 1..23: note = Synthetic construct
  source 1..23: mol_type = other DNA
tttgggccttagcagtgccctgt

SEQ ID NO: 13362 - DNA, 23 bp, synthetic construct
  misc_feature 1..23: note = Synthetic construct
  source 1..23: mol_type = other DNA
ttgggccttagcagtgccctgtc

SEQ ID NO: 13363 - DNA, 23 bp, synthetic construct
  misc_feature 1..23: note = Synthetic construct
  source 1..23: mol_type = other DNA
tgggccttagcagtgccctgtct

SEQ ID NO: 13364 - DNA, 23 bp, synthetic construct
  misc_feature 1..23: note = Synthetic construct
  source 1..23: mol_type = other DNA
gggccttagcagtgccctgtctc

SEQ ID NO: 13365 - DNA, 23 bp, synthetic construct
  misc_feature 1..23: note = Synthetic construct
  source 1..23: mol_type = other DNA
ggccttagcagtgccctgtctct

SEQ ID NO: 13366 - DNA, 23 bp, synthetic construct
  misc_feature 1..23: note = Synthetic construct
  source 1..23: mol_type = other DNA
gccttagcagtgccctgtctctc

SEQ ID NO: 13367 - DNA, 23 bp, synthetic construct
  misc_feature 1..23: note = Synthetic construct
  source 1..23: mol_type = other DNA
ccttagcagtgccctgtctctcc

SEQ ID NO: 13368 - DNA, 23 bp, synthetic construct
  misc_feature 1..23: note = Synthetic construct
  source 1..23: mol_type = other DNA
cttagcagtgccctgtctctcca

SEQ ID NO: 13369 - DNA, 23 bp, synthetic construct
  misc_feature 1..23: note = Synthetic construct
  source 1..23: mol_type = other DNA
ttagcagtgccctgtctctccac

SEQ ID NO: 13370 - DNA, 23 bp, synthetic construct
  misc_feature 1..23: note = Synthetic construct
  source 1..23: mol_type = other DNA
tagcagtgccctgtctctccaca

SEQ ID NO: 13371 - DNA, 23 bp, synthetic construct
  misc_feature 1..23: note = Synthetic construct
  source 1..23: mol_type = other DNA
agcagtgccctgtctctccacag

SEQ ID NO: 13372 - DNA, 23 bp, synthetic construct
  misc_feature 1..23: note = Synthetic construct
  source 1..23: mol_type = other DNA
gcagtgccctgtctctccacagt

SEQ ID NO: 13373 - DNA, 23 bp, synthetic construct
  misc_feature 1..23: note = Synthetic construct
  source 1..23: mol_type = other DNA
cagtgccctgtctctccacagtc

SEQ ID NO: 13374 - DNA, 23 bp, synthetic construct
  misc_feature 1..23: note = Synthetic construct
  source 1..23: mol_type = other DNA
agtgccctgtctctccacagtcc

SEQ ID NO: 13375 - DNA, 23 bp, synthetic construct
  misc_feature 1..23: note = Synthetic construct
  source 1..23: mol_type = other DNA
gtgccctgtctctccacagtcca

SEQ ID NO: 13376 - DNA, 23 bp, synthetic construct
  misc_feature 1..23: note = Synthetic construct
  source 1..23: mol_type = other DNA
tgccctgtctctccacagtccac

SEQ ID NO: 13377 - DNA, 23 bp, synthetic construct
  misc_feature 1..23: note = Synthetic construct
  source 1..23: mol_type = other DNA
gccctgtctctccacagtccacc

SEQ ID NO: 13378 - DNA, 23 bp, synthetic construct
  misc_feature 1..23: note = Synthetic construct
  source 1..23: mol_type = other DNA
ccctgtctctccacagtccaccc

SEQ ID NO: 13379 - DNA, 23 bp, synthetic construct
  misc_feature 1..23: note = Synthetic construct
  source 1..23: mol_type = other DNA
cctgtctctccacagtccacccg

SEQ ID NO: 13380 - DNA, 23 bp, synthetic construct
  misc_feature 1..23: note = Synthetic construct
  source 1..23: mol_type = other DNA
ctgtctctccacagtccacccgt

SEQ ID NO: 13381 - DNA, 23 bp, synthetic construct
  misc_feature 1..23: note = Synthetic construct
  source 1..23: mol_type = other DNA
tgtctctccacagtccacccgta

SEQ ID NO: 13382 - DNA, 23 bp, synthetic construct
  misc_feature 1..23: note = Synthetic construct
  source 1..23: mol_type = other DNA
gtctctccacagtccacccgtag

SEQ ID NO: 13383 - DNA, 23 bp, synthetic construct
  misc_feature 1..23: note = Synthetic construct
  source 1..23: mol_type = other DNA
tctctccacagtccacccgtagg

SEQ ID NO: 13384 - DNA, 23 bp, synthetic construct
  misc_feature 1..23: note = Synthetic construct
  source 1..23: mol_type = other DNA
ctctccacagtccacccgtaggg

SEQ ID NO: 13385 - DNA, 23 bp, synthetic construct
  misc_feature 1..23: note = Synthetic construct
  source 1..23: mol_type = other DNA
tctccacagtccacccgtaggga

SEQ ID NO: 13386 - DNA, 23 bp, synthetic construct
  misc_feature 1..23: note = Synthetic construct
  source 1..23: mol_type = other DNA
ctccacagtccacccgtagggag

SEQ ID NO: 13387 - DNA, 23 bp, synthetic construct
  misc_feature 1..23: note = Synthetic construct
  source 1..23: mol_type = other DNA
tccacagtccacccgtagggagc

SEQ ID NO: 13388 - DNA, 23 bp, synthetic construct
  misc_feature 1..23: note = Synthetic construct
  source 1..23: mol_type = other DNA
ccacagtccacccgtagggagcg

SEQ ID NO: 13389 - DNA, 23 bp, synthetic construct
  misc_feature 1..23: note = Synthetic construct
  source 1..23: mol_type = other DNA
cacagtccacccgtagggagcgt

SEQ ID NO: 13390 - DNA, 23 bp, synthetic construct
  misc_feature 1..23: note = Synthetic construct
  source 1..23: mol_type = other DNA
acagtccacccgtagggagcgtc

SEQ ID NO: 13391 - DNA, 23 bp, synthetic construct
  misc_feature 1..23: note = Synthetic construct
  source 1..23: mol_type = other DNA
cagtccacccgtagggagcgtca

SEQ ID NO: 13392 - DNA, 23 bp, synthetic construct
  misc_feature 1..23: note = Synthetic construct
  source 1..23: mol_type = other DNA
agtccacccgtagggagcgtcaa

SEQ ID NO: 13393 - DNA, 23 bp, synthetic construct
  misc_feature 1..23: note = Synthetic construct
  source 1..23: mol_type = other DNA
gtccacccgtagggagcgtcaac

SEQ ID NO: 13394 - DNA, 23 bp, synthetic construct
  misc_feature 1..23: note = Synthetic construct
  source 1..23: mol_type = other DNA
tccacccgtagggagcgtcaacg

SEQ ID NO: 13395 - DNA, 23 bp, synthetic construct
  misc_feature 1..23: note = Synthetic construct
  source 1..23: mol_type = other DNA
ccacccgtagggagcgtcaacgc

SEQ ID NO: 13396 - DNA, 23 bp, synthetic construct
  misc_feature 1..23: note = Synthetic construct
  source 1..23: mol_type = other DNA
cacccgtagggagcgtcaacgct

SEQ ID NO: 13397 - DNA, 23 bp, synthetic construct
  misc_feature 1..23: note = Synthetic construct
  source 1..23: mol_type = other DNA
acccgtagggagcgtcaacgctt

SEQ ID NO: 13398 - DNA, 23 bp, synthetic construct
  misc_feature 1..23: note = Synthetic construct
  source 1..23: mol_type = other DNA
cccgtagggagcgtcaacgctta

SEQ ID NO: 13399 - DNA, 23 bp, synthetic construct
  misc_feature 1..23: note = Synthetic construct
  source 1..23: mol_type = other DNA
ccgtagggagcgtcaacgcttat

SEQ ID NO: 13400 - DNA, 23 bp, synthetic construct
  misc_feature 1..23: note = Synthetic construct
  source 1..23: mol_type = other DNA
cgtagggagcgtcaacgcttatg

SEQ ID NO: 13401 - DNA, 23 bp, synthetic construct
  misc_feature 1..23: note = Synthetic construct
  source 1..23: mol_type = other DNA
gtagggagcgtcaacgcttatga

SEQ ID NO: 13402 - DNA, 23 bp, synthetic construct
  misc_feature 1..23: note = Synthetic construct
  source 1..23: mol_type = other DNA
tagggagcgtcaacgcttatgat

SEQ ID NO: 13403 - DNA, 23 bp, synthetic construct
  misc_feature 1..23: note = Synthetic construct
  source 1..23: mol_type = other DNA
agggagcgtcaacgcttatgatg

SEQ ID NO: 13404 - DNA, 23 bp, synthetic construct
  misc_feature 1..23: note = Synthetic construct
  source 1..23: mol_type = other DNA
gggagcgtcaacgcttatgatgg

SEQ ID NO: 13405 - DNA, 23 bp, synthetic construct
  misc_feature 1..23: note = Synthetic construct
  source 1..23: mol_type = other DNA
ggagcgtcaacgcttatgatgga

SEQ ID NO: 13406 - DNA, 23 bp, synthetic construct
  misc_feature 1..23: note = Synthetic construct
  source 1..23: mol_type = other DNA
gagcgtcaacgcttatgatggac

SEQ ID NO: 13407 - DNA, 23 bp, synthetic construct
  misc_feature 1..23: note = Synthetic construct
  source 1..23: mol_type = other DNA
agcgtcaacgcttatgatggact

SEQ ID NO: 13408 - DNA, 23 bp, synthetic construct
  misc_feature 1..23: note = Synthetic construct
  source 1..23: mol_type = other DNA
gcgtcaacgcttatgatggactc

SEQ ID NO: 13409 - DNA, 23 bp, synthetic construct
  misc_feature 1..23: note = Synthetic construct
  source 1..23: mol_type = other DNA
cgtcaacgcttatgatggactca

SEQ ID NO: 13410 - DNA, 23 bp, synthetic construct
  misc_feature 1..23: note = Synthetic construct
  source 1..23: mol_type = other DNA
gtcaacgcttatgatggactcac

SEQ ID NO: 13411 - DNA, 23 bp, synthetic construct
  misc_feature 1..23: note = Synthetic construct
  source 1..23: mol_type = other DNA
tcaacgcttatgatggactcacc

SEQ ID NO: 13412 - DNA, 23 bp, synthetic construct
  misc_feature 1..23: note = Synthetic construct
  source 1..23: mol_type = other DNA
caacgcttatgatggactcaccc

SEQ ID NO: 13413 - DNA, 23 bp, synthetic construct
  misc_feature 1..23: note = Synthetic construct
  source 1..23: mol_type = other DNA
aacgcttatgatggactcacccg

SEQ ID NO: 13414 - DNA, 23 bp, synthetic construct
  misc_feature 1..23: note = Synthetic construct
  source 1..23: mol_type = other DNA
acgcttatgatggactcacccgt

SEQ ID NO: 13415 - DNA, 23 bp, synthetic construct
  misc_feature 1..23: note = Synthetic construct
  source 1..23: mol_type = other DNA
cgcttatgatggactcacccgtt

SEQ ID NO: 13416 - DNA, 23 bp, synthetic construct
  misc_feature 1..23: note = Synthetic construct
  source 1..23: mol_type = other DNA
gcttatgatggactcacccgtta

SEQ ID NO: 13417 - DNA, 23 bp, synthetic construct
  misc_feature 1..23: note = Synthetic construct
  source 1..23: mol_type = other DNA
cttatgatggactcacccgttat

SEQ ID NO: 13418 - DNA, 23 bp, synthetic construct
  misc_feature 1..23: note = Synthetic construct
  source 1..23: mol_type = other DNA
ttatgatggactcacccgttatt

SEQ ID NO: 13419 - DNA, 23 bp, synthetic construct
  misc_feature 1..23: note = Synthetic construct
  source 1..23: mol_type = other DNA
tatgatggactcacccgttatta

SEQ ID NO: 13420 - DNA, 23 bp, synthetic construct
  misc_feature 1..23: note = Synthetic construct
  source 1..23: mol_type = other DNA
atgatggactcacccgttattac

SEQ ID NO: 13421 - DNA, 23 bp, synthetic construct
  misc_feature 1..23: note = Synthetic construct
  source 1..23: mol_type = other DNA
tgatggactcacccgttattacg

SEQ ID NO: 13422 - DNA, 23 bp, synthetic construct
  misc_feature 1..23: note = Synthetic construct
  source 1..23: mol_type = other DNA
gatggactcacccgttattacgt

SEQ ID NO: 13423 - DNA, 23 bp, synthetic construct
  misc_feature 1..23: note = Synthetic construct
  source 1..23: mol_type = other DNA
atggactcacccgttattacgtc

SEQ ID NO: 13424 - DNA, 23 bp, synthetic construct
  misc_feature 1..23: note = Synthetic construct
  source 1..23: mol_type = other DNA
tggactcacccgttattacgtca

SEQ ID NO: 13425 - DNA, 23 bp, synthetic construct
  misc_feature 1..23: note = Synthetic construct
  source 1..23: mol_type = other DNA
ggactcacccgttattacgtcag

SEQ ID NO: 13426 - DNA, 23 bp, synthetic construct
  misc_feature 1..23: note = Synthetic construct
  source 1..23: mol_type = other DNA
gactcacccgttattacgtcagt

SEQ ID NO: 13427 - DNA, 23 bp, synthetic construct
  misc_feature 1..23: note = Synthetic construct
  source 1..23: mol_type = other DNA
actcacccgttattacgtcagta

SEQ ID NO: 13428 - DNA, 23 bp, synthetic construct
  misc_feature 1..23: note = Synthetic construct
  source 1..23: mol_type = other DNA
ctcacccgttattacgtcagtaa

SEQ ID NO: 13429 - DNA, 23 bp, synthetic construct
  misc_feature 1..23: note = Synthetic construct
  source 1..23: mol_type = other DNA
tcacccgttattacgtcagtaac

SEQ ID NO: 13430 - DNA, 23 bp, synthetic construct
  misc_feature 1..23: note = Synthetic construct
  source 1..23: mol_type = other DNA
cacccgttattacgtcagtaact

SEQ ID NO: 13431 - DNA, 23 bp, synthetic construct
  misc_feature 1..23: note = Synthetic construct
  source 1..23: mol_type = other DNA
acccgttattacgtcagtaactg

SEQ ID NO: 13432 - DNA, 23 bp, synthetic construct
  misc_feature 1..23: note = Synthetic construct
  source 1..23: mol_type = other DNA
cccgttattacgtcagtaactgt

SEQ ID NO: 13433 - DNA, 23 bp, synthetic construct
  misc_feature 1..23: note = Synthetic construct
  source 1..23: mol_type = other DNA
ccgttattacgtcagtaactgtt

SEQ ID NO: 13434 - DNA, 23 bp, synthetic construct
  misc_feature 1..23: note = Synthetic construct
  source 1..23: mol_type = other DNA
cgttattacgtcagtaactgttc

SEQ ID NO: 13435 - DNA, 23 bp, synthetic construct
  misc_feature 1..23: note = Synthetic construct
  source 1..23: mol_type = other DNA
gttattacgtcagtaactgttcc

SEQ ID NO: 13436 - DNA, 23 bp, synthetic construct
  misc_feature 1..23: note = Synthetic construct
  source 1..23: mol_type = other DNA
ttattacgtcagtaactgttcct

SEQ ID NO: 13437 - DNA, 23 bp, synthetic construct
  misc_feature 1..23: note = Synthetic construct
  source 1..23: mol_type = other DNA
tattacgtcagtaactgttcctg

SEQ ID NO: 13438 - DNA, 23 bp, synthetic construct
  misc_feature 1..23: note = Synthetic construct
  source 1..23: mol_type = other DNA
attacgtcagtaactgttcctga

SEQ ID NO: 13439 - DNA, 23 bp, synthetic construct
  misc_feature 1..23: note = Synthetic construct
  source 1..23: mol_type = other DNA
ttacgtcagtaactgttcctgac

SEQ ID NO: 13440 - DNA, 23 bp, synthetic construct
  misc_feature 1..23: note = Synthetic construct
  source 1..23: mol_type = other DNA
tacgtcagtaactgttcctgaca

SEQ ID NO: 13441 - DNA, 23 bp, synthetic construct
  misc_feature 1..23: note = Synthetic construct
  source 1..23: mol_type = other DNA
acgtcagtaactgttcctgacat

SEQ ID NO: 13442 - DNA, 23 bp, synthetic construct
  misc_feature 1..23: note = Synthetic construct
  source 1..23: mol_type = other DNA
cgtcagtaactgttcctgacatg

SEQ ID NO: 13443 - DNA, 23 bp, synthetic construct
  misc_feature 1..23: note = Synthetic construct
  source 1..23: mol_type = other DNA
gtcagtaactgttcctgacatgt

SEQ ID NO: 13444 - DNA, 23 bp, synthetic construct
  misc_feature 1..23: note = Synthetic construct
  source 1..23: mol_type = other DNA
tcagtaactgttcctgacatgta

SEQ ID NO: 13445 - DNA, 23 bp, synthetic construct
  misc_feature 1..23: note = Synthetic construct
  source 1..23: mol_type = other DNA
cagtaactgttcctgacatgtag

SEQ ID NO: 13446 - DNA, 23 bp, synthetic construct
  misc_feature 1..23: note = Synthetic construct
  source 1..23: mol_type = other DNA
agtaactgttcctgacatgtagg

SEQ ID NO: 13447 - DNA, 23 bp, synthetic construct
  misc_feature 1..23: note = Synthetic construct
  source 1..23: mol_type = other DNA
gtaactgttcctgacatgtagga

SEQ ID NO: 13448 - DNA, 23 bp, synthetic construct
  misc_feature 1..23: note = Synthetic construct
  source 1..23: mol_type = other DNA
taactgttcctgacatgtaggag

SEQ ID NO: 13449 - DNA, 23 bp, synthetic construct
  misc_feature 1..23: note = Synthetic construct
  source 1..23: mol_type = other DNA
aactgttcctgacatgtaggagc

SEQ ID NO: 13450 - DNA, 23 bp, synthetic construct
  misc_feature 1..23: note = Synthetic construct
  source 1..23: mol_type = other DNA
actgttcctgacatgtaggagca

SEQ ID NO: 13451 - DNA, 23 bp, synthetic construct
  misc_feature 1..23: note = Synthetic construct
  source 1..23: mol_type = other DNA
ctgttcctgacatgtaggagcat

SEQ ID NO: 13452 - DNA, 23 bp, synthetic construct
  misc_feature 1..23: note = Synthetic construct
  source 1..23: mol_type = other DNA
tgttcctgacatgtaggagcatc

SEQ ID NO: 13453 - DNA, 23 bp, synthetic construct
  misc_feature 1..23: note = Synthetic construct
  source 1..23: mol_type = other DNA
gttcctgacatgtaggagcatcc

SEQ ID NO: 13454 - DNA, 23 bp, synthetic construct
  misc_feature 1..23: note = Synthetic construct
  source 1..23: mol_type = other DNA
ttcctgacatgtaggagcatccc

SEQ ID NO: 13455 - DNA, 23 bp, synthetic construct
  misc_feature 1..23: note = Synthetic construct
  source 1..23: mol_type = other DNA
tcctgacatgtaggagcatccca

SEQ ID NO: 13456 - DNA, 23 bp, synthetic construct
  misc_feature 1..23: note = Synthetic construct
  source 1..23: mol_type = other DNA
cctgacatgtaggagcatcccac

SEQ ID NO: 13457 - DNA, 23 bp, synthetic construct
  misc_feature 1..23: note = Synthetic construct
  source 1..23: mol_type = other DNA
ctgacatgtaggagcatcccacg

SEQ ID NO: 13458 - DNA, 23 bp, synthetic construct
  misc_feature 1..23: note = Synthetic construct
  source 1..23: mol_type = other DNA
tgacatgtaggagcatcccacgg

SEQ ID NO: 13459 - DNA, 23 bp, synthetic construct
  misc_feature 1..23: note = Synthetic construct
  source 1..23: mol_type = other DNA
gacatgtaggagcatcccacggg

SEQ ID NO: 13460 - DNA, 23 bp, synthetic construct
  misc_feature 1..23: note = Synthetic construct
  source 1..23: mol_type = other DNA
acatgtaggagcatcccacgggg

SEQ ID NO: 13461 - DNA, 23 bp, synthetic construct
  misc_feature 1..23: note = Synthetic construct
  source 1..23: mol_type = other DNA
catgtaggagcatcccacggggg

SEQ ID NO: 13462 - DNA, 23 bp, synthetic construct
  misc_feature 1..23: note = Synthetic construct
  source 1..23: mol_type = other DNA
atgtaggagcatcccacgggggc

SEQ ID NO: 13463 - DNA, 23 bp, synthetic construct
  misc_feature 1..23: note = Synthetic construct
  source 1..23: mol_type = other DNA
tgtaggagcatcccacgggggcc

SEQ ID NO: 13464 - DNA, 23 bp, synthetic construct
  misc_feature 1..23: note = Synthetic construct
  source 1..23: mol_type = other DNA
gtaggagcatcccacgggggccg

SEQ ID NO: 13465 - DNA, 23 bp, synthetic construct
  misc_feature 1..23: note = Synthetic construct
  source 1..23: mol_type = other DNA
taggagcatcccacgggggccgt

SEQ ID NO: 13466 - DNA, 23 bp, synthetic construct
  misc_feature 1..23: note = Synthetic construct
  source 1..23: mol_type = other DNA
aggagcatcccacgggggccgta

SEQ ID NO: 13467 - DNA, 23 bp, synthetic construct
  misc_feature 1..23: note = Synthetic construct
  source 1..23: mol_type = other DNA
ggagcatcccacgggggccgtaa

SEQ ID NO: 13468 - DNA, 23 bp, synthetic construct
  misc_feature 1..23: note = Synthetic construct
  source 1..23: mol_type = other DNA
gagcatcccacgggggccgtaag

SEQ ID NO: 13469 - DNA, 23 bp, synthetic construct
  misc_feature 1..23: note = Synthetic construct
  source 1..23: mol_type = other DNA
agcatcccacgggggccgtaagg

SEQ ID NO: 13470 - DNA, 23 bp, synthetic construct
  misc_feature 1..23: note = Synthetic construct
  source 1..23: mol_type = other DNA
gcatcccacgggggccgtaaggc

SEQ ID NO: 13471 - DNA, 23 bp, synthetic construct
  misc_feature 1..23: note = Synthetic construct
  source 1..23: mol_type = other DNA
catcccacgggggccgtaaggcc

SEQ ID NO: 13472 - DNA, 23 bp, synthetic construct
  misc_feature 1..23: note = Synthetic construct
  source 1..23: mol_type = other DNA
atcccacgggggccgtaaggccc

SEQ ID NO: 13473 - DNA, 23 bp, synthetic construct
  misc_feature 1..23: note = Synthetic construct
  source 1..23: mol_type = other DNA
tcccacgggggccgtaaggccct

SEQ ID NO: 13474 - DNA, 23 bp, synthetic construct
  misc_feature 1..23: note = Synthetic construct
  source 1..23: mol_type = other DNA
cccacgggggccgtaaggccctc

SEQ ID NO: 13475 - DNA, 23 bp, synthetic construct
  misc_feature 1..23: note = Synthetic construct
  source 1..23: mol_type = other DNA
ccacgggggccgtaaggccctcg

SEQ ID NO: 13476 - DNA, 23 bp, synthetic construct
  misc_feature 1..23: note = Synthetic construct
  source 1..23: mol_type = other DNA
cacgggggccgtaaggccctcga

SEQ ID NO: 13477 - DNA, 23 bp, synthetic construct
  misc_feature 1..23: note = Synthetic construct
  source 1..23: mol_type = other DNA
acgggggccgtaaggccctcgag

SEQ ID NO: 13478 - DNA, 23 bp, synthetic construct
  misc_feature 1..23: note = Synthetic construct
  source 1..23: mol_type = other DNA
cgggggccgtaaggccctcgagc

SEQ ID NO: 13479 - DNA, 23 bp, synthetic construct
  misc_feature 1..23: note = Synthetic construct
  source 1..23: mol_type = other DNA
gggggccgtaaggccctcgagca

SEQ ID NO: 13480 - DNA, 23 bp, synthetic construct
  misc_feature 1..23: note = Synthetic construct
  source 1..23: mol_type = other DNA
ggggccgtaaggccctcgagcat

SEQ ID NO: 13481 - DNA, 23 bp, synthetic construct
  misc_feature 1..23: note = Synthetic construct
  source 1..23: mol_type = other DNA
gggccgtaaggccctcgagcatg

SEQ ID NO: 13482 - DNA, 23 bp, synthetic construct
  misc_feature 1..23: note = Synthetic construct
  source 1..23: mol_type = other DNA
ggccgtaaggccctcgagcatgt

SEQ ID NO: 13483 - DNA, 23 bp, synthetic construct
  misc_feature 1..23: note = Synthetic construct
  source 1..23: mol_type = other DNA
gccgtaaggccctcgagcatgtt

SEQ ID NO: 13484 - DNA, 23 bp, synthetic construct
  misc_feature 1..23: note = Synthetic construct
  source 1..23: mol_type = other DNA
ccgtaaggccctcgagcatgtta

SEQ ID NO: 13485 - DNA, 23 bp, synthetic construct
  misc_feature 1..23: note = Synthetic construct
  source 1..23: mol_type = other DNA
cgtaaggccctcgagcatgttac

SEQ ID NO: 13486 - DNA, 23 bp, synthetic construct
  misc_feature 1..23: note = Synthetic construct
  source 1..23: mol_type = other DNA
gtaaggccctcgagcatgttacc

SEQ ID NO: 13487 - DNA, 23 bp, synthetic construct
  misc_feature 1..23: note = Synthetic construct
  source 1..23: mol_type = other DNA
taaggccctcgagcatgttacct

SEQ ID NO: 13488 - DNA, 23 bp, synthetic construct
  misc_feature 1..23: note = Synthetic construct
  source 1..23: mol_type = other DNA
aaggccctcgagcatgttaccta

SEQ ID NO: 13489 - DNA, 23 bp, synthetic construct
  misc_feature 1..23: note = Synthetic construct
  source 1..23: mol_type = other DNA
aggccctcgagcatgttacctac

SEQ ID NO: 13490 - DNA, 23 bp, synthetic construct
  misc_feature 1..23: note = Synthetic construct
  source 1..23: mol_type = other DNA
ggccctcgagcatgttacctaca

SEQ ID NO: 13491 - DNA, 23 bp, synthetic construct
  misc_feature 1..23: note = Synthetic construct
  source 1..23: mol_type = other DNA
gccctcgagcatgttacctacag

SEQ ID NO: 13492 - DNA, 23 bp, synthetic construct
  misc_feature 1..23: note = Synthetic construct
  source 1..23: mol_type = other DNA
ccctcgagcatgttacctacagg

SEQ ID NO: 13493 - DNA, 23 bp, synthetic construct
  misc_feature 1..23: note = Synthetic construct
  source 1..23: mol_type = other DNA
cctcgagcatgttacctacaggt

SEQ ID NO: 13494 - DNA, 23 bp, synthetic construct
  misc_feature 1..23: note = Synthetic construct
  source 1..23: mol_type = other DNA
ctcgagcatgttacctacaggta

SEQ ID NO: 13495 - DNA, 23 bp, synthetic construct
  misc_feature 1..23: note = Synthetic construct
  source 1..23: mol_type = other DNA
tcgagcatgttacctacaggtag

SEQ ID NO: 13496 - DNA, 23 bp, synthetic construct
  misc_feature 1..23: note = Synthetic construct
  source 1..23: mol_type = other DNA
cgagcatgttacctacaggtagg

SEQ ID NO: 13497 - DNA, 23 bp, synthetic construct
  misc_feature 1..23: note = Synthetic construct
  source 1..23: mol_type = other DNA
gagcatgttacctacaggtagga

SEQ ID NO: 13498 - DNA, 23 bp, synthetic construct
  misc_feature 1..23: note = Synthetic construct
  source 1..23: mol_type = other DNA
agcatgttacctacaggtaggag

SEQ ID NO: 13499 - DNA, 23 bp, synthetic construct
  misc_feature 1..23: note = Synthetic construct
  source 1..23: mol_type = other DNA
gcatgttacctacaggtaggagc

SEQ ID NO: 13500 - DNA, 23 bp, synthetic construct
  misc_feature 1..23: note = Synthetic construct
  source 1..23: mol_type = other DNA
catgttacctacaggtaggagcc

SEQ ID NO: 13501 - DNA, 23 bp, synthetic construct
  misc_feature 1..23: note = Synthetic construct
  source 1..23: mol_type = other DNA
atgttacctacaggtaggagcca

SEQ ID NO: 13502 - DNA, 23 bp, synthetic construct
  misc_feature 1..23: note = Synthetic construct
  source 1..23: mol_type = other DNA
tgttacctacaggtaggagccag

SEQ ID NO: 13503 - DNA, 23 bp, synthetic construct
  misc_feature 1..23: note = Synthetic construct
  source 1..23: mol_type = other DNA
gttacctacaggtaggagccagt

SEQ ID NO: 13504 - DNA, 23 bp, synthetic construct
  misc_feature 1..23: note = Synthetic construct
  source 1..23: mol_type = other DNA
ttacctacaggtaggagccagtc

SEQ ID NO: 13505 - DNA, 23 bp, synthetic construct
  misc_feature 1..23: note = Synthetic construct
  source 1..23: mol_type = other DNA
tacctacaggtaggagccagtcg

SEQ ID NO: 13506 - DNA, 23 bp, synthetic construct
  misc_feature 1..23: note = Synthetic construct
  source 1..23: mol_type = other DNA
acctacaggtaggagccagtcga

SEQ ID NO: 13507 - DNA, 23 bp, synthetic construct
  misc_feature 1..23: note = Synthetic construct
  source 1..23: mol_type = other DNA
cctacaggtaggagccagtcgac

SEQ ID NO: 13508 - DNA, 23 bp, synthetic construct
  misc_feature 1..23: note = Synthetic construct
  source 1..23: mol_type = other DNA
ctacaggtaggagccagtcgaca

SEQ ID NO: 13509 - DNA, 23 bp, synthetic construct
  misc_feature 1..23: note = Synthetic construct
  source 1..23: mol_type = other DNA
tacaggtaggagccagtcgacaa

SEQ ID NO: 13510 - DNA, 23 bp, synthetic construct
  misc_feature 1..23: note = Synthetic construct
  source 1..23: mol_type = other DNA
acaggtaggagccagtcgacaac

SEQ ID NO: 13511 - DNA, 23 bp, synthetic construct
  misc_feature 1..23: note = Synthetic construct
  source 1..23: mol_type = other DNA
caggtaggagccagtcgacaacg

SEQ ID NO: 13512 - DNA, 23 bp, synthetic construct
  misc_feature 1..23: note = Synthetic construct
  source 1..23: mol_type = other DNA
aggtaggagccagtcgacaacga

SEQ ID NO: 13513 - DNA, 23 bp, synthetic construct
  misc_feature 1..23: note = Synthetic construct
  source 1..23: mol_type = other DNA
ggtaggagccagtcgacaacgaa

SEQ ID NO: 13514 - DNA, 23 bp, synthetic construct
  misc_feature 1..23: note = Synthetic construct
  source 1..23: mol_type = other DNA
gtaggagccagtcgacaacgaat

SEQ ID NO: 13515 - DNA, 23 bp, synthetic construct
  misc_feature 1..23: note = Synthetic construct
  source 1..23: mol_type = other DNA
taggagccagtcgacaacgaatg

SEQ ID NO: 13516 - DNA, 23 bp, synthetic construct
  misc_feature 1..23: note = Synthetic construct
  source 1..23: mol_type = other DNA
aggagccagtcgacaacgaatga

SEQ ID NO: 13517 - DNA, 23 bp, synthetic construct
  misc_feature 1..23: note = Synthetic construct
  source 1..23: mol_type = other DNA
ggagccagtcgacaacgaatgag

SEQ ID NO: 13518 - DNA, 23 bp, synthetic construct
  misc_feature 1..23: note = Synthetic construct
  source 1..23: mol_type = other DNA
gagccagtcgacaacgaatgaga

SEQ ID NO: 13519 - DNA, 23 bp, synthetic construct
  misc_feature 1..23: note = Synthetic construct
  source 1..23: mol_type = other DNA
agccagtcgacaacgaatgagaa

SEQ ID NO: 13520 - DNA, 23 bp, synthetic construct
  misc_feature 1..23: note = Synthetic construct
  source 1..23: mol_type = other DNA
gccagtcgacaacgaatgagaaa

SEQ ID NO: 13521 - DNA, 23 bp, synthetic construct
  misc_feature 1..23: note = Synthetic construct
  source 1..23: mol_type = other DNA
ccagtcgacaacgaatgagaaag

SEQ ID NO: 13522 - DNA, 23 bp, synthetic construct
  misc_feature 1..23: note = Synthetic construct
  source 1..23: mol_type = other DNA
cagtcgacaacgaatgagaaagg

SEQ ID NO: 13523 - DNA, 23 bp, synthetic construct
  misc_feature 1..23: note = Synthetic construct
  source 1..23: mol_type = other DNA
agtcgacaacgaatgagaaaggc

SEQ ID NO: 13524 - DNA, 23 bp, synthetic construct
  misc_feature 1..23: note = Synthetic construct
  source 1..23: mol_type = other DNA
gtcgacaacgaatgagaaaggca

SEQ ID NO: 13525 - DNA, 23 bp, synthetic construct
  misc_feature 1..23: note = Synthetic construct
  source 1..23: mol_type = other DNA
tcgacaacgaatgagaaaggcac

SEQ ID NO: 13526 - DNA, 23 bp, synthetic construct
  misc_feature 1..23: note = Synthetic construct
  source 1..23: mol_type = other DNA
cgacaacgaatgagaaaggcacc

SEQ ID NO: 13527 - DNA, 23 bp, synthetic construct
  misc_feature 1..23: note = Synthetic construct
  source 1..23: mol_type = other DNA
gacaacgaatgagaaaggcacct

SEQ ID NO: 13528 - DNA, 23 bp, synthetic construct
  misc_feature 1..23: note = Synthetic construct
  source 1..23: mol_type = other DNA
acaacgaatgagaaaggcacctt

SEQ ID NO: 13529 - DNA, 23 bp, synthetic construct
  misc_feature 1..23: note = Synthetic construct
  source 1..23: mol_type = other DNA
caacgaatgagaaaggcaccttt

SEQ ID NO: 13530 - DNA, 23 bp, synthetic construct
  misc_feature 1..23: note = Synthetic construct
  source 1..23: mol_type = other DNA
aacgaatgagaaaggcacctttt

SEQ ID NO: 13531 - DNA, 23 bp, synthetic construct
  misc_feature 1..23: note = Synthetic construct
  source 1..23: mol_type = other DNA
acgaatgagaaaggcaccttttc

SEQ ID NO: 13532 - DNA, 23 bp, synthetic construct
  misc_feature 1..23: note = Synthetic construct
  source 1..23: mol_type = other DNA
cgaatgagaaaggcaccttttcc

SEQ ID NO: 13533 - DNA, 23 bp, synthetic construct
  misc_feature 1..23: note = Synthetic construct
  source 1..23: mol_type = other DNA
gaatgagaaaggcaccttttccc

SEQ ID NO: 13534 - DNA, 23 bp, synthetic construct
  misc_feature 1..23: note = Synthetic construct
  source 1..23: mol_type = other DNA
aatgagaaaggcaccttttccca

SEQ ID NO: 13535 - DNA, 23 bp, synthetic construct
  misc_feature 1..23: note = Synthetic construct
  source 1..23: mol_type = other DNA
atgagaaaggcaccttttcccac

SEQ ID NO: 13536 - DNA, 23 bp, synthetic construct
  misc_feature 1..23: note = Synthetic construct
  source 1..23: mol_type = other DNA
tgagaaaggcaccttttcccaca

SEQ ID NO: 13537 - DNA, 23 bp, synthetic construct
  misc_feature 1..23: note = Synthetic construct
  source 1..23: mol_type = other DNA
gagaaaggcaccttttcccacac

SEQ ID NO: 13538 - DNA, 23 bp, synthetic construct
  misc_feature 1..23: note = Synthetic construct
  source 1..23: mol_type = other DNA
agaaaggcaccttttcccacact

SEQ ID NO: 13539 - DNA, 23 bp, synthetic construct
  misc_feature 1..23: note = Synthetic construct
  source 1..23: mol_type = other DNA
gaaaggcaccttttcccacacta

SEQ ID NO: 13540 - DNA, 23 bp, synthetic construct
  misc_feature 1..23: note = Synthetic construct
  source 1..23: mol_type = other DNA
aaaggcaccttttcccacactat

SEQ ID NO: 13541 - DNA, 23 bp, synthetic construct
  misc_feature 1..23: note = Synthetic construct
  source 1..23: mol_type = other DNA
aaggcaccttttcccacactata

SEQ ID NO: 13542 - DNA, 23 bp, synthetic construct
  misc_feature 1..23: note = Synthetic construct
  source 1..23: mol_type = other DNA
aggcaccttttcccacactatac

SEQ ID NO: 13543 - DNA, 23 bp, synthetic construct
  misc_feature 1..23: note = Synthetic construct
  source 1..23: mol_type = other DNA
ggcaccttttcccacactatacc

SEQ ID NO: 13544 - DNA, 23 bp, synthetic construct
  misc_feature 1..23: note = Synthetic construct
  source 1..23: mol_type = other DNA
gcaccttttcccacactatacct

SEQ ID NO: 13545 - DNA, 23 bp, synthetic construct
  misc_feature 1..23: note = Synthetic construct
  source 1..23: mol_type = other DNA
caccttttcccacactataccta

SEQ ID NO: 13546 - DNA, 23 bp, synthetic construct
  misc_feature 1..23: note = Synthetic construct
  source 1..23: mol_type = other DNA
accttttcccacactatacctag

SEQ ID NO: 13547 - DNA, 23 bp, synthetic construct
  misc_feature 1..23: note = Synthetic construct
  source 1..23: mol_type = other DNA
ccttttcccacactatacctagt

SEQ ID NO: 13548 - DNA, 23 bp, synthetic construct
  misc_feature 1..23: note = Synthetic construct
  source 1..23: mol_type = other DNA
cttttcccacactatacctagtg

SEQ ID NO: 13549 - DNA, 23 bp, synthetic construct
  misc_feature 1..23: note = Synthetic construct
  source 1..23: mol_type = other DNA
ttttcccacactatacctagtgg

SEQ ID NO: 13550 - DNA, 23 bp, synthetic construct
  misc_feature 1..23: note = Synthetic construct
  source 1..23: mol_type = other DNA
tttcccacactatacctagtggg

SEQ ID NO: 13551 - DNA, 23 bp, synthetic construct
  misc_feature 1..23: note = Synthetic construct
  source 1..23: mol_type = other DNA
ttcccacactatacctagtgggt

SEQ ID NO: 13552 - DNA, 23 bp, synthetic construct
  misc_feature 1..23: note = Synthetic construct
  source 1..23: mol_type = other DNA
tcccacactatacctagtgggtt

SEQ ID NO: 13553 - DNA, 23 bp, synthetic construct
  misc_feature 1..23: note = Synthetic construct
  source 1..23: mol_type = other DNA
cccacactatacctagtgggttc

SEQ ID NO: 13554 - DNA, 23 bp, synthetic construct
  misc_feature 1..23: note = Synthetic construct
  source 1..23: mol_type = other DNA
ccacactatacctagtgggttca

SEQ ID NO: 13555 - DNA, 23 bp, synthetic construct
  misc_feature 1..23: note = Synthetic construct
  source 1..23: mol_type = other DNA
cacactatacctagtgggttcaa

SEQ ID NO: 13556 - DNA, 23 bp, synthetic construct
  misc_feature 1..23: note = Synthetic construct
  source 1..23: mol_type = other DNA
acactatacctagtgggttcaag

SEQ ID NO: 13557 - DNA, 23 bp, synthetic construct
  misc_feature 1..23: note = Synthetic construct
  source 1..23: mol_type = other DNA
cactatacctagtgggttcaaga

SEQ ID NO: 13558 - DNA, 23 bp, synthetic construct
  misc_feature 1..23: note = Synthetic construct
  source 1..23: mol_type = other DNA
actatacctagtgggttcaagat

SEQ ID NO: 13559 - DNA, 23 bp, synthetic construct
  misc_feature 1..23: note = Synthetic construct
  source 1..23: mol_type = other DNA
ctatacctagtgggttcaagata

SEQ ID NO: 13560 - DNA, 23 bp, synthetic construct
  misc_feature 1..23: note = Synthetic construct
  source 1..23: mol_type = other DNA
tatacctagtgggttcaagatac

SEQ ID NO: 13561 - DNA, 23 bp, synthetic construct
  misc_feature 1..23: note = Synthetic construct
  source 1..23: mol_type = other DNA
atacctagtgggttcaagatacc

SEQ ID NO: 13562 - DNA, 23 bp, synthetic construct
  misc_feature 1..23: note = Synthetic construct
  source 1..23: mol_type = other DNA
tacctagtgggttcaagatacct

SEQ ID NO: 13563 - DNA, 23 bp, synthetic construct
  misc_feature 1..23: note = Synthetic construct
  source 1..23: mol_type = other DNA
acctagtgggttcaagataccta

SEQ ID NO: 13564 - DNA, 23 bp, synthetic construct
  misc_feature 1..23: note = Synthetic construct
  source 1..23: mol_type = other DNA
cctagtgggttcaagatacctag

SEQ ID NO: 13565 - DNA, 23 bp, synthetic construct
  misc_feature 1..23: note = Synthetic construct
  source 1..23: mol_type = other DNA
ctagtgggttcaagatacctaga

SEQ ID NO: 13566 - DNA, 23 bp, synthetic construct
  misc_feature 1..23: note = Synthetic construct
  source 1..23: mol_type = other DNA
tagtgggttcaagatacctagag

SEQ ID NO: 13567 - DNA, 23 bp, synthetic construct
  misc_feature 1..23: note = Synthetic construct
  source 1..23: mol_type = other DNA
agtgggttcaagatacctagaga

SEQ ID NO: 13568 - DNA, 23 bp, synthetic construct
  misc_feature 1..23: note = Synthetic construct
  source 1..23: mol_type = other DNA
gtgggttcaagatacctagagac

SEQ ID NO: 13569 - DNA, 23 bp, synthetic construct
  misc_feature 1..23: note = Synthetic construct
  source 1..23: mol_type = other DNA
tgggttcaagatacctagagacg

SEQ ID NO: 13570 - DNA, 23 bp, synthetic construct
  misc_feature 1..23: note = Synthetic construct
  source 1..23: mol_type = other DNA
gggttcaagatacctagagacga

SEQ ID NO: 13571 - DNA, 23 bp, synthetic construct
  misc_feature 1..23: note = Synthetic construct
  source 1..23: mol_type = other DNA
ggttcaagatacctagagacgac

SEQ ID NO: 13572 - DNA, 23 bp, synthetic construct
  misc_feature 1..23: note = Synthetic construct
  source 1..23: mol_type = other DNA
gttcaagatacctagagacgaca

SEQ ID NO: 13573 - DNA, 23 bp, synthetic construct
  misc_feature 1..23: note = Synthetic construct
  source 1..23: mol_type = other DNA
ttcaagatacctagagacgacaa

SEQ ID NO: 13574 - DNA, 23 bp, synthetic construct
  misc_feature 1..23: note = Synthetic construct
  source 1..23: mol_type = other DNA
tcaagatacctagagacgacaac

SEQ ID NO: 13575 - DNA, 23 bp, synthetic construct
  misc_feature 1..23: note = Synthetic construct
  source 1..23: mol_type = other DNA
caagatacctagagacgacaacc

SEQ ID NO: 13576 - DNA, 23 bp, synthetic construct
  misc_feature 1..23: note = Synthetic construct
  source 1..23: mol_type = other DNA
aagatacctagagacgacaacca

SEQ ID NO: 13577 - DNA, 23 bp, synthetic construct
  misc_feature 1..23: note = Synthetic construct
  source 1..23: mol_type = other DNA
agatacctagagacgacaaccat

SEQ ID NO: 13578 - DNA, 23 bp, synthetic construct
  misc_feature 1..23: note = Synthetic construct
  source 1..23: mol_type = other DNA
gatacctagagacgacaaccatg

SEQ ID NO: 13579 - DNA, 23 bp, synthetic construct
  misc_feature 1..23: note = Synthetic construct
  source 1..23: mol_type = other DNA
atacctagagacgacaaccatgc

SEQ ID NO: 13580 - DNA, 23 bp, synthetic construct
  misc_feature 1..23: note = Synthetic construct
  source 1..23: mol_type = other DNA
tacctagagacgacaaccatgcc

SEQ ID NO: 13581 - DNA, 23 bp, synthetic construct
  misc_feature 1..23: note = Synthetic construct
  source 1..23: mol_type = other DNA
acctagagacgacaaccatgcca

SEQ ID NO: 13582 - DNA, 23 bp, synthetic construct
  misc_feature 1..23: note = Synthetic construct
  source 1..23: mol_type = other DNA
cctagagacgacaaccatgccaa

SEQ ID NO: 13583 - DNA, 23 bp, synthetic construct
  misc_feature 1..23: note = Synthetic construct
  source 1..23: mol_type = other DNA
ctagagacgacaaccatgccaaa

SEQ ID NO: 13584 - DNA, 23 bp, synthetic construct
  misc_feature 1..23: note = Synthetic construct
  source 1..23: mol_type = other DNA
tagagacgacaaccatgccaaac

SEQ ID NO: 13585 - DNA, 23 bp, synthetic construct
  misc_feature 1..23: note = Synthetic construct
  source 1..23: mol_type = other DNA
agagacgacaaccatgccaaacg

SEQ ID NO: 13586 - DNA, 23 bp, synthetic construct
  misc_feature 1..23: note = Synthetic construct
  source 1..23: mol_type = other DNA
gagacgacaaccatgccaaacgt

SEQ ID NO: 13587 - DNA, 23 bp, synthetic construct
  misc_feature 1..23: note = Synthetic construct
  source 1..23: mol_type = other DNA
agacgacaaccatgccaaacgtg

SEQ ID NO: 13588 - DNA, 23 bp, synthetic construct
  misc_feature 1..23: note = Synthetic construct
  source 1..23: mol_type = other DNA
gacgacaaccatgccaaacgtgc

SEQ ID NO: 13589 - DNA, 23 bp, synthetic construct
  misc_feature 1..23: note = Synthetic construct
  source 1..23: mol_type = other DNA
acgacaaccatgccaaacgtgca

SEQ ID NO: 13590 - DNA, 23 bp, synthetic construct
  misc_feature 1..23: note = Synthetic construct
  source 1..23: mol_type = other DNA
cgacaaccatgccaaacgtgcat

SEQ ID NO: 13591 - DNA, 23 bp, synthetic construct
  misc_feature 1..23: note = Synthetic construct
  source 1..23: mol_type = other DNA
gacaaccatgccaaacgtgcatc

SEQ ID NO: 13592 - DNA, 23 bp, synthetic construct
  misc_feature 1..23: note = Synthetic construct
  source 1..23: mol_type = other DNA
acaaccatgccaaacgtgcatcg

SEQ ID NO: 13593 - DNA, 23 bp, synthetic construct
  misc_feature 1..23: note = Synthetic construct
  source 1..23: mol_type = other DNA
caaccatgccaaacgtgcatcgt

SEQ ID NO: 13594 - DNA, 23 bp, synthetic construct
  misc_feature 1..23: note = Synthetic construct
  source 1..23: mol_type = other DNA
aaccatgccaaacgtgcatcgtt

SEQ ID NO: 13595 - DNA, 23 bp, synthetic construct
  misc_feature 1..23: note = Synthetic construct
  source 1..23: mol_type = other DNA
accatgccaaacgtgcatcgttt

SEQ ID NO: 13596 - DNA, 23 bp, synthetic construct
  misc_feature 1..23: note = Synthetic construct
  source 1..23: mol_type = other DNA
ccatgccaaacgtgcatcgttta

SEQ ID NO: 13597 - DNA, 23 bp, synthetic construct
  misc_feature 1..23: note = Synthetic construct
  source 1..23: mol_type = other DNA
catgccaaacgtgcatcgtttat

SEQ ID NO: 13598 - DNA, 23 bp, synthetic construct
  misc_feature 1..23: note = Synthetic construct
  source 1..23: mol_type = other DNA
atgccaaacgtgcatcgtttatg

SEQ ID NO: 13599 - DNA, 23 bp, synthetic construct
  misc_feature 1..23: note = Synthetic construct
  source 1..23: mol_type = other DNA
tgccaaacgtgcatcgtttatgt

SEQ ID NO: 13600 - DNA, 23 bp, synthetic construct
  misc_feature 1..23: note = Synthetic construct
  source 1..23: mol_type = other DNA
gccaaacgtgcatcgtttatgta

SEQ ID NO: 13601 - DNA, 23 bp, synthetic construct
  misc_feature 1..23: note = Synthetic construct
  source 1..23: mol_type = other DNA
ccaaacgtgcatcgtttatgtaa

SEQ ID NO: 13602 - DNA, 23 bp, synthetic construct
  misc_feature 1..23: note = Synthetic construct
  source 1..23: mol_type = other DNA
caaacgtgcatcgtttatgtaaa

SEQ ID NO: 13603 - DNA, 23 bp, synthetic construct
  misc_feature 1..23: note = Synthetic construct
  source 1..23: mol_type = other DNA
aaacgtgcatcgtttatgtaaaa

SEQ ID NO: 13604 - DNA, 23 bp, synthetic construct
  misc_feature 1..23: note = Synthetic construct
  source 1..23: mol_type = other DNA
aacgtgcatcgtttatgtaaaac

SEQ ID NO: 13605 - DNA, 23 bp, synthetic construct
  misc_feature 1..23: note = Synthetic construct
  source 1..23: mol_type = other DNA
acgtgcatcgtttatgtaaaacc

SEQ ID NO: 13606 - DNA, 23 bp, synthetic construct
  misc_feature 1..23: note = Synthetic construct
  source 1..23: mol_type = other DNA
cgtgcatcgtttatgtaaaacca

SEQ ID NO: 13607 - DNA, 23 bp, synthetic construct
  misc_feature 1..23: note = Synthetic construct
  source 1..23: mol_type = other DNA
gtgcatcgtttatgtaaaaccat

SEQ ID NO: 13608 - DNA, 23 bp, synthetic construct
  misc_feature 1..23: note = Synthetic construct
  source 1..23: mol_type = other DNA
tgcatcgtttatgtaaaaccata

SEQ ID NO: 13609 - DNA, 23 bp, synthetic construct
  misc_feature 1..23: note = Synthetic construct
  source 1..23: mol_type = other DNA
gcatcgtttatgtaaaaccatat

SEQ ID NO: 13610 - DNA, 23 bp, synthetic construct
  misc_feature 1..23: note = Synthetic construct
  source 1..23: mol_type = other DNA
catcgtttatgtaaaaccatatc

SEQ ID NO: 13611 - DNA, 23 bp, synthetic construct
  misc_feature 1..23: note = Synthetic construct
  source 1..23: mol_type = other DNA
atcgtttatgtaaaaccatatca

SEQ ID NO: 13612 - DNA, 23 bp, synthetic construct
  misc_feature 1..23: note = Synthetic construct
  source 1..23: mol_type = other DNA
tcgtttatgtaaaaccatatcac

SEQ ID NO: 13613 - DNA, 23 bp, synthetic construct
  misc_feature 1..23: note = Synthetic construct
  source 1..23: mol_type = other DNA
cgtttatgtaaaaccatatcacg

SEQ ID NO: 13614 - DNA, 23 bp, synthetic construct
  misc_feature 1..23: note = Synthetic construct
  source 1..23: mol_type = other DNA
gtttatgtaaaaccatatcacga

SEQ ID NO: 13615 - DNA, 23 bp, synthetic construct
  misc_feature 1..23: note = Synthetic construct
  source 1..23: mol_type = other DNA
tttatgtaaaaccatatcacgat

SEQ ID NO: 13616 - DNA, 23 bp, synthetic construct
  misc_feature 1..23: note = Synthetic construct
  source 1..23: mol_type = other DNA
ttatgtaaaaccatatcacgata

SEQ ID NO: 13617 - DNA, 23 bp, synthetic construct
  misc_feature 1..23: note = Synthetic construct
  source 1..23: mol_type = other DNA
tatgtaaaaccatatcacgatac

SEQ ID NO: 13618 - DNA, 23 bp, synthetic construct
  misc_feature 1..23: note = Synthetic construct
  source 1..23: mol_type = other DNA
atgtaaaaccatatcacgatacg

SEQ ID NO: 13619 - DNA, 23 bp, synthetic construct
  misc_feature 1..23: note = Synthetic construct
  source 1..23: mol_type = other DNA
tgtaaaaccatatcacgatacgt

SEQ ID NO: 13620 - DNA, 23 bp, synthetic construct
  misc_feature 1..23: note = Synthetic construct
  source 1..23: mol_type = other DNA
gtaaaaccatatcacgatacgtc

SEQ ID NO: 13621 - DNA, 23 bp, synthetic construct
  misc_feature 1..23: note = Synthetic construct
  source 1..23: mol_type = other DNA
taaaaccatatcacgatacgtcg

SEQ ID NO: 13622 - DNA, 23 bp, synthetic construct
  misc_feature 1..23: note = Synthetic construct
  source 1..23: mol_type = other DNA
aaaaccatatcacgatacgtcgc

SEQ ID NO: 13623 - DNA, 23 bp, synthetic construct
  misc_feature 1..23: note = Synthetic construct
  source 1..23: mol_type = other DNA
aaaccatatcacgatacgtcgcg

SEQ ID NO: 13624 - DNA, 23 bp, synthetic construct
  misc_feature 1..23: note = Synthetic construct
  source 1..23: mol_type = other DNA
aaccatatcacgatacgtcgcga

SEQ ID NO: 13625 - DNA, 23 bp, synthetic construct
  misc_feature 1..23: note = Synthetic construct
  source 1..23: mol_type = other DNA
accatatcacgatacgtcgcgat

SEQ ID NO: 13626 - DNA, 23 bp, synthetic construct
  misc_feature 1..23: note = Synthetic construct
  source 1..23: mol_type = other DNA
ccatatcacgatacgtcgcgata

SEQ ID NO: 13627 - DNA, 23 bp, synthetic construct
  misc_feature 1..23: note = Synthetic construct
  source 1..23: mol_type = other DNA
catatcacgatacgtcgcgatat

SEQ ID NO: 13628 - DNA, 23 bp, synthetic construct
  misc_feature 1..23: note = Synthetic construct
  source 1..23: mol_type = other DNA
atatcacgatacgtcgcgatatg

SEQ ID NO: 13629 - DNA, 23 bp, synthetic construct
  misc_feature 1..23: note = Synthetic construct
  source 1..23: mol_type = other DNA
tatcacgatacgtcgcgatatgt

SEQ ID NO: 13630 - DNA, 23 bp, synthetic construct
  misc_feature 1..23: note = Synthetic construct
  source 1..23: mol_type = other DNA
atcacgatacgtcgcgatatgtt

SEQ ID NO: 13631 - DNA, 23 bp, synthetic construct
  misc_feature 1..23: note = Synthetic construct
  source 1..23: mol_type = other DNA
tcacgatacgtcgcgatatgttg

SEQ ID NO: 13632 - DNA, 23 bp, synthetic construct
  misc_feature 1..23: note = Synthetic construct
  source 1..23: mol_type = other DNA
cacgatacgtcgcgatatgttgc

SEQ ID NO: 13633 - DNA, 23 bp, synthetic construct
  misc_feature 1..23: note = Synthetic construct
  source 1..23: mol_type = other DNA
acgatacgtcgcgatatgttgca

SEQ ID NO: 13634 - DNA, 23 bp, synthetic construct
  misc_feature 1..23: note = Synthetic construct
  source 1..23: mol_type = other DNA
cgatacgtcgcgatatgttgcac

SEQ ID NO: 13635 - DNA, 23 bp, synthetic construct
  misc_feature 1..23: note = Synthetic construct
  source 1..23: mol_type = other DNA
gatacgtcgcgatatgttgcacg

SEQ ID NO: 13636 - DNA, 23 bp, synthetic construct
  misc_feature 1..23: note = Synthetic construct
  source 1..23: mol_type = other DNA
atacgtcgcgatatgttgcacgt

SEQ ID NO: 13637 - DNA, 23 bp, synthetic construct
  misc_feature 1..23: note = Synthetic construct
  source 1..23: mol_type = other DNA
tacgtcgcgatatgttgcacgtt

SEQ ID NO: 13638 - DNA, 23 bp, synthetic construct
  misc_feature 1..23: note = Synthetic construct
  source 1..23: mol_type = other DNA
acgtcgcgatatgttgcacgttg

SEQ ID NO: 13639 - DNA, 23 bp, synthetic construct
  misc_feature 1..23: note = Synthetic construct
  source 1..23: mol_type = other DNA
cgtcgcgatatgttgcacgttgt

SEQ ID NO: 13640 - DNA, 23 bp, synthetic construct
  misc_feature 1..23: note = Synthetic construct
  source 1..23: mol_type = other DNA
gtcgcgatatgttgcacgttgtc

SEQ ID NO: 13641 - DNA, 23 bp, synthetic construct
  misc_feature 1..23: note = Synthetic construct
  source 1..23: mol_type = other DNA
tcgcgatatgttgcacgttgtct

SEQ ID NO: 13642 - DNA, 23 bp, synthetic construct
  misc_feature 1..23: note = Synthetic construct
  source 1..23: mol_type = other DNA
cgcgatatgttgcacgttgtctg

SEQ ID NO: 13643 - DNA, 23 bp, synthetic construct
  misc_feature 1..23: note = Synthetic construct
  source 1..23: mol_type = other DNA
gcgatatgttgcacgttgtctgg

SEQ ID NO: 13644 - DNA, 23 bp, synthetic construct
  misc_feature 1..23: note = Synthetic construct
  source 1..23: mol_type = other DNA
cgatatgttgcacgttgtctgga

SEQ ID NO: 13645 - DNA, 23 bp, synthetic construct
  misc_feature 1..23: note = Synthetic construct
  source 1..23: mol_type = other DNA
gatatgttgcacgttgtctggaa

SEQ ID NO: 13646 - DNA, 23 bp, synthetic construct
  misc_feature 1..23: note = Synthetic construct
  source 1..23: mol_type = other DNA
atatgttgcacgttgtctggaag

SEQ ID NO: 13647 - DNA, 23 bp, synthetic construct
  misc_feature 1..23: note = Synthetic construct
  source 1..23: mol_type = other DNA
tatgttgcacgttgtctggaagt

SEQ ID NO: 13648 - DNA, 23 bp, synthetic construct
  misc_feature 1..23: note = Synthetic construct
  source 1..23: mol_type = other DNA
atgttgcacgttgtctggaagtt

SEQ ID NO: 13649 - DNA, 23 bp, synthetic construct
  misc_feature 1..23: note = Synthetic construct
  source 1..23: mol_type = other DNA
tgttgcacgttgtctggaagttt

SEQ ID NO: 13650 - DNA, 23 bp, synthetic construct
  misc_feature 1..23: note = Synthetic construct
  source 1..23: mol_type = other DNA
gttgcacgttgtctggaagtttg

SEQ ID NO: 13651 - DNA, 23 bp, synthetic construct
  misc_feature 1..23: note = Synthetic construct
  source 1..23: mol_type = other DNA
ttgcacgttgtctggaagtttgc

SEQ ID NO: 13652 - DNA, 23 bp, synthetic construct
  misc_feature 1..23: note = Synthetic construct
  source 1..23: mol_type = other DNA
tgcacgttgtctggaagtttgca

SEQ ID NO: 13653 - DNA, 23 bp, synthetic construct
  misc_feature 1..23: note = Synthetic construct
  source 1..23: mol_type = other DNA
gcacgttgtctggaagtttgcag

SEQ ID NO: 13654 - DNA, 23 bp, synthetic construct
  misc_feature 1..23: note = Synthetic construct
  source 1..23: mol_type = other DNA
cacgttgtctggaagtttgcagc

SEQ ID NO: 13655 - DNA, 23 bp, synthetic construct
  misc_feature 1..23: note = Synthetic construct
  source 1..23: mol_type = other DNA
acgttgtctggaagtttgcagct

SEQ ID NO: 13656 - DNA, 23 bp, synthetic construct
  misc_feature 1..23: note = Synthetic construct
  source 1..23: mol_type = other DNA
cgttgtctggaagtttgcagctg

SEQ ID NO: 13657 - DNA, 23 bp, synthetic construct
  misc_feature 1..23: note = Synthetic construct
  source 1..23: mol_type = other DNA
gttgtctggaagtttgcagctgg

SEQ ID NO: 13658 - DNA, 23 bp, synthetic construct
  misc_feature 1..23: note = Synthetic construct
  source 1..23: mol_type = other DNA
ttgtctggaagtttgcagctgga

SEQ ID NO: 13659 - DNA, 23 bp, synthetic construct
  misc_feature 1..23: note = Synthetic construct
  source 1..23: mol_type = other DNA
tgtctggaagtttgcagctggat

SEQ ID NO: 13660 - DNA, 23 bp, synthetic construct
  misc_feature 1..23: note = Synthetic construct
  source 1..23: mol_type = other DNA
gtctggaagtttgcagctggata

SEQ ID NO: 13661 - DNA, 23 bp, synthetic construct
  misc_feature 1..23: note = Synthetic construct
  source 1..23: mol_type = other DNA
tctggaagtttgcagctggatac

SEQ ID NO: 13662 - DNA, 23 bp, synthetic construct
  misc_feature 1..23: note = Synthetic construct
  source 1..23: mol_type = other DNA
ctggaagtttgcagctggatacg

SEQ ID NO: 13663 - DNA, 23 bp, synthetic construct
  misc_feature 1..23: note = Synthetic construct
  source 1..23: mol_type = other DNA
tggaagtttgcagctggatacga

SEQ ID NO: 13664 - DNA, 23 bp, synthetic construct
  misc_feature 1..23: note = Synthetic construct
  source 1..23: mol_type = other DNA
ggaagtttgcagctggatacgac

SEQ ID NO: 13665 - DNA, 23 bp, synthetic construct
  misc_feature 1..23: note = Synthetic construct
  source 1..23: mol_type = other DNA
gaagtttgcagctggatacgaca

SEQ ID NO: 13666 - DNA, 23 bp, synthetic construct
  misc_feature 1..23: note = Synthetic construct
  source 1..23: mol_type = other DNA
aagtttgcagctggatacgacag

SEQ ID NO: 13667 - DNA, 23 bp, synthetic construct
  misc_feature 1..23: note = Synthetic construct
  source 1..23: mol_type = other DNA
agtttgcagctggatacgacaga

SEQ ID NO: 13668 - DNA, 23 bp, synthetic construct
  misc_feature 1..23: note = Synthetic construct
  source 1..23: mol_type = other DNA
gtttgcagctggatacgacagac

SEQ ID NO: 13669 - DNA, 23 bp, synthetic construct
  misc_feature 1..23: note = Synthetic construct
  source 1..23: mol_type = other DNA
tttgcagctggatacgacagacg

SEQ ID NO: 13670 - DNA, 23 bp, synthetic construct
  misc_feature 1..23: note = Synthetic construct
  source 1..23: mol_type = other DNA
ttgcagctggatacgacagacgg

SEQ ID NO: 13671 - DNA, 23 bp, synthetic construct
  misc_feature 1..23: note = Synthetic construct
  source 1..23: mol_type = other DNA
tgcagctggatacgacagacggc

SEQ ID NO: 13672 - DNA, 23 bp, synthetic construct
  misc_feature 1..23: note = Synthetic construct
  source 1..23: mol_type = other DNA
gcagctggatacgacagacggcc

SEQ ID NO: 13673 - DNA, 23 bp, synthetic construct
  misc_feature 1..23: note = Synthetic construct
  source 1..23: mol_type = other DNA
cagctggatacgacagacggcca

SEQ ID NO: 13674 - DNA, 23 bp, synthetic construct
  misc_feature 1..23: note = Synthetic construct
  source 1..23: mol_type = other DNA
agctggatacgacagacggccat

SEQ ID NO: 13675 - DNA, 23 bp, synthetic construct
  misc_feature 1..23: note = Synthetic construct
  source 1..23: mol_type = other DNA
gctggatacgacagacggccatc

SEQ ID NO: 13676 - DNA, 23 bp, synthetic construct
  misc_feature 1..23: note = Synthetic construct
  source 1..23: mol_type = other DNA
ctggatacgacagacggccatct

SEQ ID NO: 13677 - DNA, 23 bp, synthetic construct
  misc_feature 1..23: note = Synthetic construct
  source 1..23: mol_type = other DNA
tggatacgacagacggccatcta

SEQ ID NO: 13678 - DNA, 23 bp, synthetic construct
  misc_feature 1..23: note = Synthetic construct
  source 1..23: mol_type = other DNA
ggatacgacagacggccatctaa

SEQ ID NO: 13679 - DNA, 23 bp, synthetic construct
  misc_feature 1..23: note = Synthetic construct
  source 1..23: mol_type = other DNA
gatacgacagacggccatctaac

SEQ ID NO: 13680 - DNA, 23 bp, synthetic construct
  misc_feature 1..23: note = Synthetic construct
  source 1..23: mol_type = other DNA
atacgacagacggccatctaact

SEQ ID NO: 13681 - DNA, 23 bp, synthetic construct
  misc_feature 1..23: note = Synthetic construct
  source 1..23: mol_type = other DNA
tacgacagacggccatctaactt

SEQ ID NO: 13682 - DNA, 23 bp, synthetic construct
  misc_feature 1..23: note = Synthetic construct
  source 1..23: mol_type = other DNA
acgacagacggccatctaacttg

SEQ ID NO: 13683 - DNA, 23 bp, synthetic construct
  misc_feature 1..23: note = Synthetic construct
  source 1..23: mol_type = other DNA
cgacagacggccatctaacttga

SEQ ID NO: 13684 - DNA, 23 bp, synthetic construct
  misc_feature 1..23: note = Synthetic construct
  source 1..23: mol_type = other DNA
gacagacggccatctaacttgat

SEQ ID NO: 13685 - DNA, 23 bp, synthetic construct
  misc_feature 1..23: note = Synthetic construct
  source 1..23: mol_type = other DNA
acagacggccatctaacttgatg

SEQ ID NO: 13686 - DNA, 23 bp, synthetic construct
  misc_feature 1..23: note = Synthetic construct
  source 1..23: mol_type = other DNA
cagacggccatctaacttgatgt

SEQ ID NO: 13687 - DNA, 23 bp, synthetic construct
  misc_feature 1..23: note = Synthetic construct
  source 1..23: mol_type = other DNA
agacggccatctaacttgatgtt

SEQ ID NO: 13688 - DNA, 23 bp, synthetic construct
  misc_feature 1..23: note = Synthetic construct
  source 1..23: mol_type = other DNA
gacggccatctaacttgatgtta

SEQ ID NO: 13689 - DNA, 23 bp, synthetic construct
  misc_feature 1..23: note = Synthetic construct
  source 1..23: mol_type = other DNA
acggccatctaacttgatgttag

SEQ ID NO: 13690 - DNA, 23 bp, synthetic construct
  misc_feature 1..23: note = Synthetic construct
  source 1..23: mol_type = other DNA
cggccatctaacttgatgttagt

SEQ ID NO: 13691 - DNA, 23 bp, synthetic construct
  misc_feature 1..23: note = Synthetic construct
  source 1..23: mol_type = other DNA
ggccatctaacttgatgttagta

SEQ ID NO: 13692 - DNA, 23 bp, synthetic construct
  misc_feature 1..23: note = Synthetic construct
  source 1..23: mol_type = other DNA
gccatctaacttgatgttagtac

SEQ ID NO: 13693 - DNA, 23 bp, synthetic construct
  misc_feature 1..23: note = Synthetic construct
  source 1..23: mol_type = other DNA
ccatctaacttgatgttagtacc

SEQ ID NO: 13694 - DNA, 23 bp, synthetic construct
  misc_feature 1..23: note = Synthetic construct
  source 1..23: mol_type = other DNA
catctaacttgatgttagtaccg

SEQ ID NO: 13695 - DNA, 23 bp, synthetic construct
  misc_feature 1..23: note = Synthetic construct
  source 1..23: mol_type = other DNA
atctaacttgatgttagtaccga

SEQ ID NO: 13696 - DNA, 23 bp, synthetic construct
  misc_feature 1..23: note = Synthetic construct
  source 1..23: mol_type = other DNA
tctaacttgatgttagtaccgac

SEQ ID NO: 13697 - DNA, 23 bp, synthetic construct
  misc_feature 1..23: note = Synthetic construct
  source 1..23: mol_type = other DNA
ctaacttgatgttagtaccgacc

SEQ ID NO: 13698 - DNA, 23 bp, synthetic construct
  misc_feature 1..23: note = Synthetic construct
  source 1..23: mol_type = other DNA
taacttgatgttagtaccgacct

SEQ ID NO: 13699 - DNA, 23 bp, synthetic construct
  misc_feature 1..23: note = Synthetic construct
  source 1..23: mol_type = other DNA
aacttgatgttagtaccgacctg

SEQ ID NO: 13700 - DNA, 23 bp, synthetic construct
  misc_feature 1..23: note = Synthetic construct
  source 1..23: mol_type = other DNA
acttgatgttagtaccgacctga

SEQ ID NO: 13701 - DNA, 23 bp, synthetic construct
  misc_feature 1..23: note = Synthetic construct
  source 1..23: mol_type = other DNA
cttgatgttagtaccgacctgac

SEQ ID NO: 13702 - DNA, 23 bp, synthetic construct
  misc_feature 1..23: note = Synthetic construct
  source 1..23: mol_type = other DNA
ttgatgttagtaccgacctgacg

SEQ ID NO: 13703 - DNA, 23 bp, synthetic construct
  misc_feature 1..23: note = Synthetic construct
  source 1..23: mol_type = other DNA
tgatgttagtaccgacctgacgt

SEQ ID NO: 13704 - DNA, 23 bp, synthetic construct
  misc_feature 1..23: note = Synthetic construct
  source 1..23: mol_type = other DNA
gatgttagtaccgacctgacgta

SEQ ID NO: 13705 - DNA, 23 bp, synthetic construct
  misc_feature 1..23: note = Synthetic construct
  source 1..23: mol_type = other DNA
atgttagtaccgacctgacgtac

SEQ ID NO: 13706 - DNA, 23 bp, synthetic construct
  misc_feature 1..23: note = Synthetic construct
  source 1..23: mol_type = other DNA
tgttagtaccgacctgacgtacg

SEQ ID NO: 13707 - DNA, 23 bp, synthetic construct
  misc_feature 1..23: note = Synthetic construct
  source 1..23: mol_type = other DNA
gttagtaccgacctgacgtacgg

SEQ ID NO: 13708 - DNA, 23 bp, synthetic construct
  misc_feature 1..23: note = Synthetic construct
  source 1..23: mol_type = other DNA
ttagtaccgacctgacgtacggc

SEQ ID NO: 13709 - DNA, 23 bp, synthetic construct
  misc_feature 1..23: note = Synthetic construct
  source 1..23: mol_type = other DNA
tagtaccgacctgacgtacggct

SEQ ID NO: 13710 - DNA, 23 bp, synthetic construct
  misc_feature 1..23: note = Synthetic construct
  source 1..23: mol_type = other DNA
agtaccgacctgacgtacggctc

SEQ ID NO: 13711 - DNA, 23 bp, synthetic construct
  misc_feature 1..23: note = Synthetic construct
  source 1..23: mol_type = other DNA
gtaccgacctgacgtacggctct

SEQ ID NO: 13712 - DNA, 23 bp, synthetic construct
  misc_feature 1..23: note = Synthetic construct
  source 1..23: mol_type = other DNA
taccgacctgacgtacggctctc

SEQ ID NO: 13713 - DNA, 23 bp, synthetic construct
  misc_feature 1..23: note = Synthetic construct
  source 1..23: mol_type = other DNA
accgacctgacgtacggctctca

SEQ ID NO: 13714 - DNA, 23 bp, synthetic construct
  misc_feature 1..23: note = Synthetic construct
  source 1..23: mol_type = other DNA
ccgacctgacgtacggctctcat

SEQ ID NO: 13715 - DNA, 23 bp, synthetic construct
  misc_feature 1..23: note = Synthetic construct
  source 1..23: mol_type = other DNA
cgacctgacgtacggctctcata

SEQ ID NO: 13716 - DNA, 23 bp, synthetic construct
  misc_feature 1..23: note = Synthetic construct
  source 1..23: mol_type = other DNA
gacctgacgtacggctctcatag

SEQ ID NO: 13717 - DNA, 23 bp, synthetic construct
  misc_feature 1..23: note = Synthetic construct
  source 1..23: mol_type = other DNA
acctgacgtacggctctcatagg

SEQ ID NO: 13718 - DNA, 23 bp, synthetic construct
  misc_feature 1..23: note = Synthetic construct
  source 1..23: mol_type = other DNA
cctgacgtacggctctcatagga

SEQ ID NO: 13719 - DNA, 23 bp, synthetic construct
  misc_feature 1..23: note = Synthetic construct
  source 1..23: mol_type = other DNA
ctgacgtacggctctcataggaa

SEQ ID NO: 13720 - DNA, 23 bp, synthetic construct
  misc_feature 1..23: note = Synthetic construct
  source 1..23: mol_type = other DNA
tgacgtacggctctcataggaag

SEQ ID NO: 13721 - DNA, 23 bp, synthetic construct
  misc_feature 1..23: note = Synthetic construct
  source 1..23: mol_type = other DNA
gacgtacggctctcataggaaga

SEQ ID NO: 13722 - DNA, 23 bp, synthetic construct
  misc_feature 1..23: note = Synthetic construct
  source 1..23: mol_type = other DNA
acgtacggctctcataggaagaa

SEQ ID NO: 13723 - DNA, 23 bp, synthetic construct
  misc_feature 1..23: note = Synthetic construct
  source 1..23: mol_type = other DNA
cgtacggctctcataggaagaaa

SEQ ID NO: 13724 - DNA, 23 bp, synthetic construct
  misc_feature 1..23: note = Synthetic construct
  source 1..23: mol_type = other DNA
gtacggctctcataggaagaaac

SEQ ID NO: 13725 - DNA, 23 bp, synthetic construct
  misc_feature 1..23: note = Synthetic construct
  source 1..23: mol_type = other DNA
tacggctctcataggaagaaact

SEQ ID NO: 13726 - DNA, 23 bp, synthetic construct
  misc_feature 1..23: note = Synthetic construct
  source 1..23: mol_type = other DNA
acggctctcataggaagaaactc

SEQ ID NO: 13727 - DNA, 23 bp, synthetic construct
  misc_feature 1..23: note = Synthetic construct
  source 1..23: mol_type = other DNA
cggctctcataggaagaaactct

SEQ ID NO: 13728 - DNA, 23 bp, synthetic construct
  misc_feature 1..23: note = Synthetic construct
  source 1..23: mol_type = other DNA
ggctctcataggaagaaactctt

SEQ ID NO: 13729 - DNA, 23 bp, synthetic construct
  misc_feature 1..23: note = Synthetic construct
  source 1..23: mol_type = other DNA
gctctcataggaagaaactcttg

SEQ ID NO: 13730 - DNA, 23 bp, synthetic construct
  misc_feature 1..23: note = Synthetic construct
  source 1..23: mol_type = other DNA
ctctcataggaagaaactcttga

SEQ ID NO: 13731 - DNA, 23 bp, synthetic construct
  misc_feature 1..23: note = Synthetic construct
  source 1..23: mol_type = other DNA
tctcataggaagaaactcttgaa

SEQ ID NO: 13732 - DNA, 23 bp, synthetic construct
  misc_feature 1..23: note = Synthetic construct
  source 1..23: mol_type = other DNA
ctcataggaagaaactcttgaag

SEQ ID NO: 13733 - DNA, 23 bp, synthetic construct
  misc_feature 1..23: note = Synthetic construct
  source 1..23: mol_type = other DNA
tcataggaagaaactcttgaagg

SEQ ID NO: 13734 - DNA, 23 bp, synthetic construct
  misc_feature 1..23: note = Synthetic construct
  source 1..23: mol_type = other DNA
cataggaagaaactcttgaaggt

SEQ ID NO: 13735 - DNA, 23 bp, synthetic construct
  misc_feature 1..23: note = Synthetic construct
  source 1..23: mol_type = other DNA
ataggaagaaactcttgaaggtg

SEQ ID NO: 13736 - DNA, 23 bp, synthetic construct
  misc_feature 1..23: note = Synthetic construct
  source 1..23: mol_type = other DNA
taggaagaaactcttgaaggtga

SEQ ID NO: 13737 - DNA, 23 bp, synthetic construct
  misc_feature 1..23: note = Synthetic construct
  source 1..23: mol_type = other DNA
aggaagaaactcttgaaggtgaa

SEQ ID NO: 13738 - DNA, 23 bp, synthetic construct
  misc_feature 1..23: note = Synthetic construct
  source 1..23: mol_type = other DNA
ggaagaaactcttgaaggtgaac

SEQ ID NO: 13739 - DNA, 23 bp, synthetic construct
  misc_feature 1..23: note = Synthetic construct
  source 1..23: mol_type = other DNA
gaagaaactcttgaaggtgaacc

SEQ ID NO: 13740 - DNA, 23 bp, synthetic construct
  misc_feature 1..23: note = Synthetic construct
  source 1..23: mol_type = other DNA
aagaaactcttgaaggtgaacct

SEQ ID NO: 13741 - DNA, 23 bp, synthetic construct
  misc_feature 1..23: note = Synthetic construct
  source 1..23: mol_type = other DNA
agaaactcttgaaggtgaacctt

SEQ ID NO: 13742 - DNA, 23 bp, synthetic construct
  misc_feature 1..23: note = Synthetic construct
  source 1..23: mol_type = other DNA
gaaactcttgaaggtgaaccttc

SEQ ID NO: 13743 - DNA, 23 bp, synthetic construct
  misc_feature 1..23: note = Synthetic construct
  source 1..23: mol_type = other DNA
aaactcttgaaggtgaaccttcg

SEQ ID NO: 13744 - DNA, 23 bp, synthetic construct
  misc_feature 1..23: note = Synthetic construct
  source 1..23: mol_type = other DNA
aactcttgaaggtgaaccttcgt

SEQ ID NO: 13745 - DNA, 23 bp, synthetic construct
  misc_feature 1..23: note = Synthetic construct
  source 1..23: mol_type = other DNA
actcttgaaggtgaaccttcgta

SEQ ID NO: 13746 - DNA, 23 bp, synthetic construct
  misc_feature 1..23: note = Synthetic construct
  source 1..23: mol_type = other DNA
ctcttgaaggtgaaccttcgtaa

SEQ ID NO: 13747 - DNA, 23 bp, synthetic construct
  misc_feature 1..23: note = Synthetic construct
  source 1..23: mol_type = other DNA
tcttgaaggtgaaccttcgtaag

SEQ ID NO: 13748 - DNA, 23 bp, synthetic construct
  misc_feature 1..23: note = Synthetic construct
  source 1..23: mol_type = other DNA
cttgaaggtgaaccttcgtaagc

SEQ ID NO: 13749 - DNA, 23 bp, synthetic construct
  misc_feature 1..23: note = Synthetic construct
  source 1..23: mol_type = other DNA
ttgaaggtgaaccttcgtaagca

SEQ ID NO: 13750 - DNA, 23 bp, synthetic construct
  misc_feature 1..23: note = Synthetic construct
  source 1..23: mol_type = other DNA
tgaaggtgaaccttcgtaagcat

SEQ ID NO: 13751 - DNA, 23 bp, synthetic construct
  misc_feature 1..23: note = Synthetic construct
  source 1..23: mol_type = other DNA
gaaggtgaaccttcgtaagcatc

SEQ ID NO: 13752 - DNA, 23 bp, synthetic construct
  misc_feature 1..23: note = Synthetic construct
  source 1..23: mol_type = other DNA
aaggtgaaccttcgtaagcatct

SEQ ID NO: 13753 - DNA, 23 bp, synthetic construct
  misc_feature 1..23: note = Synthetic construct
  source 1..23: mol_type = other DNA
aggtgaaccttcgtaagcatctc

SEQ ID NO: 13754 - DNA, 23 bp, synthetic construct
  misc_feature 1..23: note = Synthetic construct
  source 1..23: mol_type = other DNA
ggtgaaccttcgtaagcatctca

SEQ ID NO: 13755 - DNA, 23 bp, synthetic construct
  misc_feature 1..23: note = Synthetic construct
  source 1..23: mol_type = other DNA
gtgaaccttcgtaagcatctcat

SEQ ID NO: 13756 - DNA, 23 bp, synthetic construct
  misc_feature 1..23: note = Synthetic construct
  source 1..23: mol_type = other DNA
tgaaccttcgtaagcatctcata

SEQ ID NO: 13757 - DNA, 23 bp, synthetic construct
  misc_feature 1..23: note = Synthetic construct
  source 1..23: mol_type = other DNA
gaaccttcgtaagcatctcatat

SEQ ID NO: 13758 - DNA, 23 bp, synthetic construct
  misc_feature 1..23: note = Synthetic construct
  source 1..23: mol_type = other DNA
aaccttcgtaagcatctcatatg

SEQ ID NO: 13759 - DNA, 23 bp, synthetic construct
  misc_feature 1..23: note = Synthetic construct
  source 1..23: mol_type = other DNA
accttcgtaagcatctcatatgc

SEQ ID NO: 13760 - DNA, 23 bp, synthetic construct
  misc_feature 1..23: note = Synthetic construct
  source 1..23: mol_type = other DNA
ccttcgtaagcatctcatatgca

SEQ ID NO: 13761 - DNA, 23 bp, synthetic construct
  misc_feature 1..23: note = Synthetic construct
  source 1..23: mol_type = other DNA
cttcgtaagcatctcatatgcac

SEQ ID NO: 13762 - DNA, 23 bp, synthetic construct
  misc_feature 1..23: note = Synthetic construct
  source 1..23: mol_type = other DNA
ttcgtaagcatctcatatgcacc

SEQ ID NO: 13763 - DNA, 23 bp, synthetic construct
  misc_feature 1..23: note = Synthetic construct
  source 1..23: mol_type = other DNA
tcgtaagcatctcatatgcaccc

SEQ ID NO: 13764 - DNA, 23 bp, synthetic construct
  misc_feature 1..23: note = Synthetic construct
  source 1..23: mol_type = other DNA
cgtaagcatctcatatgcaccct

SEQ ID NO: 13765 - DNA, 23 bp, synthetic construct
  misc_feature 1..23: note = Synthetic construct
  source 1..23: mol_type = other DNA
gtaagcatctcatatgcaccctg

SEQ ID NO: 13766 - DNA, 23 bp, synthetic construct
  misc_feature 1..23: note = Synthetic construct
  source 1..23: mol_type = other DNA
taagcatctcatatgcaccctgg

SEQ ID NO: 13767 - DNA, 23 bp, synthetic construct
  misc_feature 1..23: note = Synthetic construct
  source 1..23: mol_type = other DNA
aagcatctcatatgcaccctgga

SEQ ID NO: 13768 - DNA, 23 bp, synthetic construct
  misc_feature 1..23: note = Synthetic construct
  source 1..23: mol_type = other DNA
agcatctcatatgcaccctggat

SEQ ID NO: 13769 - DNA, 23 bp, synthetic construct
  misc_feature 1..23: note = Synthetic construct
  source 1..23: mol_type = other DNA
gcatctcatatgcaccctggata

SEQ ID NO: 13770 - DNA, 23 bp, synthetic construct
  misc_feature 1..23: note = Synthetic construct
  source 1..23: mol_type = other DNA
catctcatatgcaccctggatat

SEQ ID NO: 13771 - DNA, 23 bp, synthetic construct
  misc_feature 1..23: note = Synthetic construct
  source 1..23: mol_type = other DNA
atctcatatgcaccctggatatc

SEQ ID NO: 13772 - DNA, 23 bp, synthetic construct
  misc_feature 1..23: note = Synthetic construct
  source 1..23: mol_type = other DNA
tctcatatgcaccctggatatca

SEQ ID NO: 13773 - DNA, 23 bp, synthetic construct
  misc_feature 1..23: note = Synthetic construct
  source 1..23: mol_type = other DNA
ctcatatgcaccctggatatcac

SEQ ID NO: 13774 - DNA, 23 bp, synthetic construct
  misc_feature 1..23: note = Synthetic construct
  source 1..23: mol_type = other DNA
tcatatgcaccctggatatcact

SEQ ID NO: 13775 - DNA, 23 bp, synthetic construct
  misc_feature 1..23: note = Synthetic construct
  source 1..23: mol_type = other DNA
catatgcaccctggatatcactc

SEQ ID NO: 13776 - DNA, 23 bp, synthetic construct
  misc_feature 1..23: note = Synthetic construct
  source 1..23: mol_type = other DNA
atatgcaccctggatatcactca

SEQ ID NO: 13777 - DNA, 23 bp, synthetic construct
  misc_feature 1..23: note = Synthetic construct
  source 1..23: mol_type = other DNA
tatgcaccctggatatcactcat

SEQ ID NO: 13778 - DNA, 23 bp, synthetic construct
  misc_feature 1..23: note = Synthetic construct
  source 1..23: mol_type = other DNA
atgcaccctggatatcactcatt

SEQ ID NO: 13779 - DNA, 23 bp, synthetic construct
  misc_feature 1..23: note = Synthetic construct
  source 1..23: mol_type = other DNA
tgcaccctggatatcactcatta

SEQ ID NO: 13780 - DNA, 23 bp, synthetic construct
  misc_feature 1..23: note = Synthetic construct
  source 1..23: mol_type = other DNA
gcaccctggatatcactcattag

SEQ ID NO: 13781 - DNA, 23 bp, synthetic construct
  misc_feature 1..23: note = Synthetic construct
  source 1..23: mol_type = other DNA
caccctggatatcactcattagt

SEQ ID NO: 13782 - DNA, 23 bp, synthetic construct
  misc_feature 1..23: note = Synthetic construct
  source 1..23: mol_type = other DNA
accctggatatcactcattagtg

SEQ ID NO: 13783 - DNA, 23 bp, synthetic construct
  misc_feature 1..23: note = Synthetic construct
  source 1..23: mol_type = other DNA
ccctggatatcactcattagtgg

SEQ ID NO: 13784 - DNA, 23 bp, synthetic construct
  misc_feature 1..23: note = Synthetic construct
  source 1..23: mol_type = other DNA
cctggatatcactcattagtggt

SEQ ID NO: 13785 - DNA, 23 bp, synthetic construct
  misc_feature 1..23: note = Synthetic construct
  source 1..23: mol_type = other DNA
ctggatatcactcattagtggta

SEQ ID NO: 13786 - DNA, 23 bp, synthetic construct
  misc_feature 1..23: note = Synthetic construct
  source 1..23: mol_type = other DNA
tggatatcactcattagtggtaa

SEQ ID NO: 13787 - DNA, 23 bp, synthetic construct
  misc_feature 1..23: note = Synthetic construct
  source 1..23: mol_type = other DNA
ggatatcactcattagtggtaac

SEQ ID NO: 13788 - DNA, 23 bp, synthetic construct
  misc_feature 1..23: note = Synthetic construct
  source 1..23: mol_type = other DNA
gatatcactcattagtggtaacc

SEQ ID NO: 13789 - DNA, 23 bp, synthetic construct
  misc_feature 1..23: note = Synthetic construct
  source 1..23: mol_type = other DNA
atatcactcattagtggtaacca

SEQ ID NO: 13790 - DNA, 23 bp, synthetic construct
  misc_feature 1..23: note = Synthetic construct
  source 1..23: mol_type = other DNA
tatcactcattagtggtaaccaa

SEQ ID NO: 13791 - DNA, 23 bp, synthetic construct
  misc_feature 1..23: note = Synthetic construct
  source 1..23: mol_type = other DNA
atcactcattagtggtaaccaac

SEQ ID NO: 13792 - DNA, 23 bp, synthetic construct
  misc_feature 1..23: note = Synthetic construct
  source 1..23: mol_type = other DNA
tcactcattagtggtaaccaacc

SEQ ID NO: 13793 - DNA, 23 bp, synthetic construct
  misc_feature 1..23: note = Synthetic construct
  source 1..23: mol_type = other DNA
cactcattagtggtaaccaaccg

SEQ ID NO: 13794 - DNA, 23 bp, synthetic construct
  misc_feature 1..23: note = Synthetic construct
  source 1..23: mol_type = other DNA
actcattagtggtaaccaaccga

SEQ ID NO: 13795 - DNA, 23 bp, synthetic construct
  misc_feature 1..23: note = Synthetic construct
  source 1..23: mol_type = other DNA
ctcattagtggtaaccaaccgaa

SEQ ID NO: 13796 - DNA, 23 bp, synthetic construct
  misc_feature 1..23: note = Synthetic construct
  source 1..23: mol_type = other DNA
tcattagtggtaaccaaccgaac

SEQ ID NO: 13797 - DNA, 23 bp, synthetic construct
  misc_feature 1..23: note = Synthetic construct
  source 1..23: mol_type = other DNA
cattagtggtaaccaaccgaact

SEQ ID NO: 13798 - DNA, 23 bp, synthetic construct
  misc_feature 1..23: note = Synthetic construct
  source 1..23: mol_type = other DNA
attagtggtaaccaaccgaactg

SEQ ID NO: 13799 - DNA, 23 bp, synthetic construct
  misc_feature 1..23: note = Synthetic construct
  source 1..23: mol_type = other DNA
ttagtggtaaccaaccgaactgc

SEQ ID NO: 13800 - DNA, 23 bp, synthetic construct
  misc_feature 1..23: note = Synthetic construct
  source 1..23: mol_type = other DNA
tagtggtaaccaaccgaactgca

SEQ ID NO: 13801 - DNA, 23 bp, synthetic construct
  misc_feature 1..23: note = Synthetic construct
  source 1..23: mol_type = other DNA
agtggtaaccaaccgaactgcaa

SEQ ID NO: 13802 - DNA, 23 bp, synthetic construct
  misc_feature 1..23: note = Synthetic construct
  source 1..23: mol_type = other DNA
gtggtaaccaaccgaactgcaac

SEQ ID NO: 13803 - DNA, 23 bp, synthetic construct
  misc_feature 1..23: note = Synthetic construct
  source 1..23: mol_type = other DNA
tggtaaccaaccgaactgcaact

SEQ ID NO: 13804 - DNA, 23 bp, synthetic construct
  misc_feature 1..23: note = Synthetic construct
  source 1..23: mol_type = other DNA
ggtaaccaaccgaactgcaactc

SEQ ID NO: 13805 - DNA, 23 bp, synthetic construct
  misc_feature 1..23: note = Synthetic construct
  source 1..23: mol_type = other DNA
gtaaccaaccgaactgcaactcc

SEQ ID NO: 13806 - DNA, 23 bp, synthetic construct
  misc_feature 1..23: note = Synthetic construct
  source 1..23: mol_type = other DNA
taaccaaccgaactgcaactcca

SEQ ID NO: 13807 - DNA, 23 bp, synthetic construct
  misc_feature 1..23: note = Synthetic construct
  source 1..23: mol_type = other DNA
aaccaaccgaactgcaactccaa

SEQ ID NO: 13808 - DNA, 23 bp, synthetic construct
  misc_feature 1..23: note = Synthetic construct
  source 1..23: mol_type = other DNA
accaaccgaactgcaactccaac

SEQ ID NO: 13809 - DNA, 23 bp, synthetic construct
  misc_feature 1..23: note = Synthetic construct
  source 1..23: mol_type = other DNA
ccaaccgaactgcaactccaacc

SEQ ID NO: 13810 - DNA, 23 bp, synthetic construct
  misc_feature 1..23: note = Synthetic construct
  source 1..23: mol_type = other DNA
caaccgaactgcaactccaacca

SEQ ID NO: 13811 - DNA, 23 bp, synthetic construct
  misc_feature 1..23: note = Synthetic construct
  source 1..23: mol_type = other DNA
aaccgaactgcaactccaaccac

SEQ ID NO: 13812 - DNA, 23 bp, synthetic construct
  misc_feature 1..23: note = Synthetic construct
  source 1..23: mol_type = other DNA
accgaactgcaactccaaccacc

SEQ ID NO: 13813 - DNA, 23 bp, synthetic construct
  misc_feature 1..23: note = Synthetic construct
  source 1..23: mol_type = other DNA
ccgaactgcaactccaaccacct

SEQ ID NO: 13814 - DNA, 23 bp, synthetic construct
  misc_feature 1..23: note = Synthetic construct
  source 1..23: mol_type = other DNA
cgaactgcaactccaaccacctg

SEQ ID NO: 13815 - DNA, 23 bp, synthetic construct
  misc_feature 1..23: note = Synthetic construct
  source 1..23: mol_type = other DNA
gaactgcaactccaaccacctgc

SEQ ID NO: 13816 - DNA, 23 bp, synthetic construct
  misc_feature 1..23: note = Synthetic construct
  source 1..23: mol_type = other DNA
aactgcaactccaaccacctgcc

SEQ ID NO: 13817 - DNA, 23 bp, synthetic construct
  misc_feature 1..23: note = Synthetic construct
  source 1..23: mol_type = other DNA
actgcaactccaaccacctgccg

SEQ ID NO: 13818 - DNA, 23 bp, synthetic construct
  misc_feature 1..23: note = Synthetic construct
  source 1..23: mol_type = other DNA
ctgcaactccaaccacctgccgg

SEQ ID NO: 13819 - DNA, 23 bp, synthetic construct
  misc_feature 1..23: note = Synthetic construct
  source 1..23: mol_type = other DNA
tgcaactccaaccacctgccggc

SEQ ID NO: 13820 - DNA, 23 bp, synthetic construct
  misc_feature 1..23: note = Synthetic construct
  source 1..23: mol_type = other DNA
gcaactccaaccacctgccggcc

SEQ ID NO: 13821 - DNA, 23 bp, synthetic construct
  misc_feature 1..23: note = Synthetic construct
  source 1..23: mol_type = other DNA
caactccaaccacctgccggcca

SEQ ID NO: 13822 - DNA, 23 bp, synthetic construct
  misc_feature 1..23: note = Synthetic construct
  source 1..23: mol_type = other DNA
aactccaaccacctgccggccac

SEQ ID NO: 13823 - DNA, 23 bp, synthetic construct
  misc_feature 1..23: note = Synthetic construct
  source 1..23: mol_type = other DNA
actccaaccacctgccggccacg

SEQ ID NO: 13824 - DNA, 23 bp, synthetic construct
  misc_feature 1..23: note = Synthetic construct
  source 1..23: mol_type = other DNA
ctccaaccacctgccggccacgt

SEQ ID NO: 13825 - DNA, 23 bp, synthetic construct
  misc_feature 1..23: note = Synthetic construct
  source 1..23: mol_type = other DNA
tccaaccacctgccggccacgtg

SEQ ID NO: 13826 - DNA, 23 bp, synthetic construct
  misc_feature 1..23: note = Synthetic construct
  source 1..23: mol_type = other DNA
ccaaccacctgccggccacgtgt

SEQ ID NO: 13827 - DNA, 23 bp, synthetic construct
  misc_feature 1..23: note = Synthetic construct
  source 1..23: mol_type = other DNA
caaccacctgccggccacgtgtt

SEQ ID NO: 13828 - DNA, 23 bp, synthetic construct
  misc_feature 1..23: note = Synthetic construct
  source 1..23: mol_type = other DNA
aaccacctgccggccacgtgttt

SEQ ID NO: 13829 - DNA, 23 bp, synthetic construct
  misc_feature 1..23: note = Synthetic construct
  source 1..23: mol_type = other DNA
accacctgccggccacgtgtttt

SEQ ID NO: 13830 - DNA, 23 bp, synthetic construct
  misc_feature 1..23: note = Synthetic construct
  source 1..23: mol_type = other DNA
ccacctgccggccacgtgttttg

SEQ ID NO: 13831 - DNA, 23 bp, synthetic construct
  misc_feature 1..23: note = Synthetic construct
  source 1..23: mol_type = other DNA
cacctgccggccacgtgttttga

SEQ ID NO: 13832 - DNA, 23 bp, synthetic construct
  misc_feature 1..23: note = Synthetic construct
  source 1..23: mol_type = other DNA
acctgccggccacgtgttttgat

SEQ ID NO: 13833 - DNA, 23 bp, synthetic construct
  misc_feature 1..23: note = Synthetic construct
  source 1..23: mol_type = other DNA
cctgccggccacgtgttttgatc

SEQ ID NO: 13834 - DNA, 23 bp, synthetic construct
  misc_feature 1..23: note = Synthetic construct
  source 1..23: mol_type = other DNA
ctgccggccacgtgttttgatcg

SEQ ID NO: 13835 - DNA, 23 bp, synthetic construct
  misc_feature 1..23: note = Synthetic construct
  source 1..23: mol_type = other DNA
tgccggccacgtgttttgatcga

SEQ ID NO: 13836 - DNA, 23 bp, synthetic construct
  misc_feature 1..23: note = Synthetic construct
  source 1..23: mol_type = other DNA
gccggccacgtgttttgatcgaa

SEQ ID NO: 13837 - DNA, 23 bp, synthetic construct
  misc_feature 1..23: note = Synthetic construct
  source 1..23: mol_type = other DNA
ccggccacgtgttttgatcgaaa

SEQ ID NO: 13838 - DNA, 23 bp, synthetic construct
  misc_feature 1..23: note = Synthetic construct
  source 1..23: mol_type = other DNA
cggccacgtgttttgatcgaaac

SEQ ID NO: 13839 - DNA, 23 bp, synthetic construct
  misc_feature 1..23: note = Synthetic construct
  source 1..23: mol_type = other DNA
ggccacgtgttttgatcgaaact

SEQ ID NO: 13840 - DNA, 23 bp, synthetic construct
  misc_feature 1..23: note = Synthetic construct
  source 1..23: mol_type = other DNA
gccacgtgttttgatcgaaactt

SEQ ID NO: 13841 - DNA, 23 bp, synthetic construct
  misc_feature 1..23: note = Synthetic construct
  source 1..23: mol_type = other DNA
ccacgtgttttgatcgaaacttt

SEQ ID NO: 13842 - DNA, 23 bp, synthetic construct
  misc_feature 1..23: note = Synthetic construct
  source 1..23: mol_type = other DNA
cacgtgttttgatcgaaactttc

SEQ ID NO: 13843 - DNA, 23 bp, synthetic construct
  misc_feature 1..23: note = Synthetic construct
  source 1..23: mol_type = other DNA
acgtgttttgatcgaaactttcg

SEQ ID NO: 13844 - DNA, 23 bp, synthetic construct
  misc_feature 1..23: note = Synthetic construct
  source 1..23: mol_type = other DNA
cgtgttttgatcgaaactttcga

SEQ ID NO: 13845 - DNA, 23 bp, synthetic construct
  misc_feature 1..23: note = Synthetic construct
  source 1..23: mol_type = other DNA
gtgttttgatcgaaactttcgat

SEQ ID NO: 13846 - DNA, 23 bp, synthetic construct
  misc_feature 1..23: note = Synthetic construct
  source 1..23: mol_type = other DNA
tgttttgatcgaaactttcgatc

SEQ ID NO: 13847 - DNA, 23 bp, synthetic construct
  misc_feature 1..23: note = Synthetic construct
  source 1..23: mol_type = other DNA
gttttgatcgaaactttcgatct

SEQ ID NO: 13848 - DNA, 23 bp, synthetic construct
  misc_feature 1..23: note = Synthetic construct
  source 1..23: mol_type = other DNA
ttttgatcgaaactttcgatctt

SEQ ID NO: 13849 - DNA, 23 bp, synthetic construct
  misc_feature 1..23: note = Synthetic construct
  source 1..23: mol_type = other DNA
tttgatcgaaactttcgatcttc

SEQ ID NO: 13850 - DNA, 23 bp, synthetic construct
  misc_feature 1..23: note = Synthetic construct
  source 1..23: mol_type = other DNA
ttgatcgaaactttcgatcttcg

SEQ ID NO: 13851 - DNA, 23 bp, synthetic construct
  misc_feature 1..23: note = Synthetic construct
  source 1..23: mol_type = other DNA
tgatcgaaactttcgatcttcgt

SEQ ID NO: 13852 - DNA, 23 bp, synthetic construct
  misc_feature 1..23: note = Synthetic construct
  source 1..23: mol_type = other DNA
gatcgaaactttcgatcttcgtt

SEQ ID NO: 13853 - DNA, 23 bp, synthetic construct
  misc_feature 1..23: note = Synthetic construct
  source 1..23: mol_type = other DNA
atcgaaactttcgatcttcgttt

SEQ ID NO: 13854 - DNA, 23 bp, synthetic construct
  misc_feature 1..23: note = Synthetic construct
  source 1..23: mol_type = other DNA
tcgaaactttcgatcttcgttta

SEQ ID NO: 13855 - DNA, 23 bp, synthetic construct
  misc_feature 1..23: note = Synthetic construct
  source 1..23: mol_type = other DNA
cgaaactttcgatcttcgtttag

SEQ ID NO: 13856 - DNA, 23 bp, synthetic construct
  misc_feature 1..23: note = Synthetic construct
  source 1..23: mol_type = other DNA
gaaactttcgatcttcgtttagg

SEQ ID NO: 13857 - DNA, 23 bp, synthetic construct
  misc_feature 1..23: note = Synthetic construct
  source 1..23: mol_type = other DNA
aaactttcgatcttcgtttaggg

SEQ ID NO: 13858 - DNA, 23 bp, synthetic construct
  misc_feature 1..23: note = Synthetic construct
  source 1..23: mol_type = other DNA
aactttcgatcttcgtttagggc

SEQ ID NO: 13859 - DNA, 23 bp, synthetic construct
  misc_feature 1..23: note = Synthetic construct
  source 1..23: mol_type = other DNA
actttcgatcttcgtttagggca

SEQ ID NO: 13860 - DNA, 23 bp, synthetic construct
  misc_feature 1..23: note = Synthetic construct
  source 1..23: mol_type = other DNA
ctttcgatcttcgtttagggcaa

SEQ ID NO: 13861 - DNA, 23 bp, synthetic construct
  misc_feature 1..23: note = Synthetic construct
  source 1..23: mol_type = other DNA
tttcgatcttcgtttagggcaag

SEQ ID NO: 13862 - DNA, 23 bp, synthetic construct
  misc_feature 1..23: note = Synthetic construct
  source 1..23: mol_type = other DNA
ttcgatcttcgtttagggcaagg

SEQ ID NO: 13863 - DNA, 23 bp, synthetic construct
  misc_feature 1..23: note = Synthetic construct
  source 1..23: mol_type = other DNA
tcgatcttcgtttagggcaaggt

SEQ ID NO: 13864 - DNA, 23 bp, synthetic construct
  misc_feature 1..23: note = Synthetic construct
  source 1..23: mol_type = other DNA
cgatcttcgtttagggcaaggta

SEQ ID NO: 13865 - DNA, 23 bp, synthetic construct
  misc_feature 1..23: note = Synthetic construct
  source 1..23: mol_type = other DNA
gatcttcgtttagggcaaggtag

SEQ ID NO: 13866 - DNA, 23 bp, synthetic construct
  misc_feature 1..23: note = Synthetic construct
  source 1..23: mol_type = other DNA
atcttcgtttagggcaaggtagc

SEQ ID NO: 13867 - DNA, 23 bp, synthetic construct
  misc_feature 1..23: note = Synthetic construct
  source 1..23: mol_type = other DNA
tcttcgtttagggcaaggtagcg

SEQ ID NO: 13868 - DNA, 23 bp, synthetic construct
  misc_feature 1..23: note = Synthetic construct
  source 1..23: mol_type = other DNA
cttcgtttagggcaaggtagcgg

SEQ ID NO: 13869 - DNA, 23 bp, synthetic construct
  misc_feature 1..23: note = Synthetic construct
  source 1..23: mol_type = other DNA
ttcgtttagggcaaggtagcgga

SEQ ID NO: 13870 - DNA, 23 bp, synthetic construct
  misc_feature 1..23: note = Synthetic construct
  source 1..23: mol_type = other DNA
tcgtttagggcaaggtagcggag

SEQ ID NO: 13871 - DNA, 23 bp, synthetic construct
  misc_feature 1..23: note = Synthetic construct
  source 1..23: mol_type = other DNA
cgtttagggcaaggtagcggagc

SEQ ID NO: 13872 - DNA, 23 bp, synthetic construct
  misc_feature 1..23: note = Synthetic construct
  source 1..23: mol_type = other DNA
gtttagggcaaggtagcggagcg

SEQ ID NO: 13873 - DNA, 23 bp, synthetic construct
  misc_feature 1..23: note = Synthetic construct
  source 1..23: mol_type = other DNA
tttagggcaaggtagcggagcgc

SEQ ID NO: 13874 - DNA, 23 bp, synthetic construct
  misc_feature 1..23: note = Synthetic construct
  source 1..23: mol_type = other DNA
ttagggcaaggtagcggagcgcc

SEQ ID NO: 13875 - DNA, 23 bp, synthetic construct
  misc_feature 1..23: note = Synthetic construct
  source 1..23: mol_type = other DNA
tagggcaaggtagcggagcgcct

SEQ ID NO: 13876 - DNA, 23 bp, synthetic construct
  misc_feature 1..23: note = Synthetic construct
  source 1..23: mol_type = other DNA
agggcaaggtagcggagcgcctg

SEQ ID NO: 13877 - DNA, 23 bp, synthetic construct
  misc_feature 1..23: note = Synthetic construct
  source 1..23: mol_type = other DNA
gggcaaggtagcggagcgcctgg

SEQ ID NO: 13878 - DNA, 23 bp, synthetic construct
  misc_feature 1..23: note = Synthetic construct
  source 1..23: mol_type = other DNA
ggcaaggtagcggagcgcctggc

SEQ ID NO: 13879 - DNA, 23 bp, synthetic construct
  misc_feature 1..23: note = Synthetic construct
  source 1..23: mol_type = other DNA
gcaaggtagcggagcgcctggcg

SEQ ID NO: 13880 - DNA, 23 bp, synthetic construct
  misc_feature 1..23: note = Synthetic construct
  source 1..23: mol_type = other DNA
caaggtagcggagcgcctggcgc

SEQ ID NO: 13881 - DNA, 23 bp, synthetic construct
  misc_feature 1..23: note = Synthetic construct
  source 1..23: mol_type = other DNA
aaggtagcggagcgcctggcgcc

SEQ ID NO: 13882 - DNA, 23 bp, synthetic construct
  misc_feature 1..23: note = Synthetic construct
  source 1..23: mol_type = other DNA
aggtagcggagcgcctggcgcca

SEQ ID NO: 13883 - DNA, 23 bp, synthetic construct
  misc_feature 1..23: note = Synthetic construct
  source 1..23: mol_type = other DNA
ggtagcggagcgcctggcgccaa

SEQ ID NO: 13884 - DNA, 23 bp, synthetic construct
  misc_feature 1..23: note = Synthetic construct
  source 1..23: mol_type = other DNA
gtagcggagcgcctggcgccaat

SEQ ID NO: 13885 - DNA, 23 bp, synthetic construct
  misc_feature 1..23: note = Synthetic construct
  source 1..23: mol_type = other DNA
tagcggagcgcctggcgccaatt

SEQ ID NO: 13886 - DNA, 23 bp, synthetic construct
  misc_feature 1..23: note = Synthetic construct
  source 1..23: mol_type = other DNA
agcggagcgcctggcgccaatta

SEQ ID NO: 13887 - DNA, 23 bp, synthetic construct
  misc_feature 1..23: note = Synthetic construct
  source 1..23: mol_type = other DNA
gcggagcgcctggcgccaattac

SEQ ID NO: 13888 - DNA, 23 bp, synthetic construct
  misc_feature 1..23: note = Synthetic construct
  source 1..23: mol_type = other DNA
cggagcgcctggcgccaattacc

SEQ ID NO: 13889 - DNA, 23 bp, synthetic construct
  misc_feature 1..23: note = Synthetic construct
  source 1..23: mol_type = other DNA
ggagcgcctggcgccaattaccg

SEQ ID NO: 13890 - DNA, 23 bp, synthetic construct
  misc_feature 1..23: note = Synthetic construct
  source 1..23: mol_type = other DNA
gagcgcctggcgccaattaccgc

SEQ ID NO: 13891 - DNA, 23 bp, synthetic construct
  misc_feature 1..23: note = Synthetic construct
  source 1..23: mol_type = other DNA
agcgcctggcgccaattaccgcg

SEQ ID NO: 13892 - DNA, 23 bp, synthetic construct
  misc_feature 1..23: note = Synthetic construct
  source 1..23: mol_type = other DNA
gcgcctggcgccaattaccgcga

SEQ ID NO: 13893 - DNA, 23 bp, synthetic construct
  misc_feature 1..23: note = Synthetic construct
  source 1..23: mol_type = other DNA
cgcctggcgccaattaccgcgac

SEQ ID NO: 13894 - DNA, 23 bp, synthetic construct
  misc_feature 1..23: note = Synthetic construct
  source 1..23: mol_type = other DNA
gcctggcgccaattaccgcgacg

SEQ ID NO: 13895 - DNA, 23 bp, synthetic construct
  misc_feature 1..23: note = Synthetic construct
  source 1..23: mol_type = other DNA
cctggcgccaattaccgcgacga

SEQ ID NO: 13896 - DNA, 23 bp, synthetic construct
  misc_feature 1..23: note = Synthetic construct
  source 1..23: mol_type = other DNA
ctggcgccaattaccgcgacgag

SEQ ID NO: 13897 - DNA, 23 bp, synthetic construct
  misc_feature 1..23: note = Synthetic construct
  source 1..23: mol_type = other DNA
tggcgccaattaccgcgacgagc

SEQ ID NO: 13898 - DNA, 23 bp, synthetic construct
  misc_feature 1..23: note = Synthetic construct
  source 1..23: mol_type = other DNA
ggcgccaattaccgcgacgagcg

SEQ ID NO: 13899 - DNA, 23 bp, synthetic construct
  misc_feature 1..23: note = Synthetic construct
  source 1..23: mol_type = other DNA
gcgccaattaccgcgacgagcgg

SEQ ID NO: 13900 - DNA, 23 bp, synthetic construct
  misc_feature 1..23: note = Synthetic construct
  source 1..23: mol_type = other DNA
cgccaattaccgcgacgagcggc

SEQ ID NO: 13901 - DNA, 23 bp, synthetic construct
  misc_feature 1..23: note = Synthetic construct
  source 1..23: mol_type = other DNA
gccaattaccgcgacgagcggca

SEQ ID NO: 13902 - DNA, 23 bp, synthetic construct
  misc_feature 1..23: note = Synthetic construct
  source 1..23: mol_type = other DNA
ccaattaccgcgacgagcggcag

SEQ ID NO: 13903 - DNA, 23 bp, synthetic construct
  misc_feature 1..23: note = Synthetic construct
  source 1..23: mol_type = other DNA
caattaccgcgacgagcggcagt

SEQ ID NO: 13904 - DNA, 23 bp, synthetic construct
  misc_feature 1..23: note = Synthetic construct
  source 1..23: mol_type = other DNA
aattaccgcgacgagcggcagtg

SEQ ID NO: 13905 - DNA, 23 bp, synthetic construct
  misc_feature 1..23: note = Synthetic construct
  source 1..23: mol_type = other DNA
attaccgcgacgagcggcagtgt

SEQ ID NO: 13906 - DNA, 23 bp, synthetic construct
  misc_feature 1..23: note = Synthetic construct
  source 1..23: mol_type = other DNA
ttaccgcgacgagcggcagtgta

SEQ ID NO: 13907 - DNA, 23 bp, synthetic construct
  misc_feature 1..23: note = Synthetic construct
  source 1..23: mol_type = other DNA
taccgcgacgagcggcagtgtac

SEQ ID NO: 13908 - DNA, 23 bp, synthetic construct
  misc_feature 1..23: note = Synthetic construct
  source 1..23: mol_type = other DNA
accgcgacgagcggcagtgtacg

SEQ ID NO: 13909 - DNA, 23 bp, synthetic construct
  misc_feature 1..23: note = Synthetic construct
  source 1..23: mol_type = other DNA
ccgcgacgagcggcagtgtacgc

SEQ ID NO: 13910 - DNA, 23 bp, synthetic construct
  misc_feature 1..23: note = Synthetic construct
  source 1..23: mol_type = other DNA
cgcgacgagcggcagtgtacgcc

SEQ ID NO: 13911 - DNA, 23 bp, synthetic construct
  misc_feature 1..23: note = Synthetic construct
  source 1..23: mol_type = other DNA
gcgacgagcggcagtgtacgcct

SEQ ID NO: 13912 - DNA, 23 bp, synthetic construct
  misc_feature 1..23: note = Synthetic construct
  source 1..23: mol_type = other DNA
cgacgagcggcagtgtacgcctt

SEQ ID NO: 13913 - DNA, 23 bp, synthetic construct
  misc_feature 1..23: note = Synthetic construct
  source 1..23: mol_type = other DNA
gacgagcggcagtgtacgccttc

SEQ ID NO: 13914 - DNA, 23 bp, synthetic construct
  misc_feature 1..23: note = Synthetic construct
  source 1..23: mol_type = other DNA
acgagcggcagtgtacgccttca

SEQ ID NO: 13915 - DNA, 23 bp, synthetic construct
  misc_feature 1..23: note = Synthetic construct
  source 1..23: mol_type = other DNA
cgagcggcagtgtacgccttcac

SEQ ID NO: 13916 - DNA, 23 bp, synthetic construct
  misc_feature 1..23: note = Synthetic construct
  source 1..23: mol_type = other DNA
gagcggcagtgtacgccttcacg

SEQ ID NO: 13917 - DNA, 23 bp, synthetic construct
  misc_feature 1..23: note = Synthetic construct
  source 1..23: mol_type = other DNA
agcggcagtgtacgccttcacga

SEQ ID NO: 13918 - DNA, 23 bp, synthetic construct
  misc_feature 1..23: note = Synthetic construct
  source 1..23: mol_type = other DNA
gcggcagtgtacgccttcacgag

SEQ ID NO: 13919 - DNA, 23 bp, synthetic construct
  misc_feature 1..23: note = Synthetic construct
  source 1..23: mol_type = other DNA
cggcagtgtacgccttcacgagc

SEQ ID NO: 13920 - DNA, 23 bp, synthetic construct
  misc_feature 1..23: note = Synthetic construct
  source 1..23: mol_type = other DNA
ggcagtgtacgccttcacgagcg

SEQ ID NO: 13921 - DNA, 23 bp, synthetic construct
  misc_feature 1..23: note = Synthetic construct
  source 1..23: mol_type = other DNA
gcagtgtacgccttcacgagcgc

SEQ ID NO: 13922 - DNA, 23 bp, synthetic construct
  misc_feature 1..23: note = Synthetic construct
  source 1..23: mol_type = other DNA
cagtgtacgccttcacgagcgca

SEQ ID NO: 13923 - DNA, 23 bp, synthetic construct
  misc_feature 1..23: note = Synthetic construct
  source 1..23: mol_type = other DNA
agtgtacgccttcacgagcgcaa

SEQ ID NO: 13924 - DNA, 23 bp, synthetic construct
  misc_feature 1..23: note = Synthetic construct
  source 1..23: mol_type = other DNA
gtgtacgccttcacgagcgcaat

SEQ ID NO: 13925 - DNA, 23 bp, synthetic construct
  misc_feature 1..23: note = Synthetic construct
  source 1..23: mol_type = other DNA
tgtacgccttcacgagcgcaatg

SEQ ID NO: 13926 - DNA, 23 bp, synthetic construct
  misc_feature 1..23: note = Synthetic construct
  source 1..23: mol_type = other DNA
gtacgccttcacgagcgcaatgg

SEQ ID NO: 13927 - DNA, 23 bp, synthetic construct
  misc_feature 1..23: note = Synthetic construct
  source 1..23: mol_type = other DNA
tacgccttcacgagcgcaatggt

SEQ ID NO: 13928 - DNA, 23 bp, synthetic construct
  misc_feature 1..23: note = Synthetic construct
  source 1..23: mol_type = other DNA
acgccttcacgagcgcaatggtt

SEQ ID NO: 13929 - DNA, 23 bp, synthetic construct
  misc_feature 1..23: note = Synthetic construct
  source 1..23: mol_type = other DNA
cgccttcacgagcgcaatggttt

SEQ ID NO: 13930 - DNA, 23 bp, synthetic construct
  misc_feature 1..23: note = Synthetic construct
  source 1..23: mol_type = other DNA
gccttcacgagcgcaatggtttg

SEQ ID NO: 13931 - DNA, 23 bp, synthetic construct
  misc_feature 1..23: note = Synthetic construct
  source 1..23: mol_type = other DNA
ccttcacgagcgcaatggtttgc

SEQ ID NO: 13932 - DNA, 23 bp, synthetic construct
  misc_feature 1..23: note = Synthetic construct
  source 1..23: mol_type = other DNA
cttcacgagcgcaatggtttgcg

SEQ ID NO: 13933 - DNA, 23 bp, synthetic construct
  misc_feature 1..23: note = Synthetic construct
  source 1..23: mol_type = other DNA
ttcacgagcgcaatggtttgcgt

SEQ ID NO: 13934 - DNA, 23 bp, synthetic construct
  misc_feature 1..23: note = Synthetic construct
  source 1..23: mol_type = other DNA
tcacgagcgcaatggtttgcgtc

SEQ ID NO: 13935 - DNA, 23 bp, synthetic construct
  misc_feature 1..23: note = Synthetic construct
  source 1..23: mol_type = other DNA
cacgagcgcaatggtttgcgtcg

SEQ ID NO: 13936 - DNA, 23 bp, synthetic construct
  misc_feature 1..23: note = Synthetic construct
  source 1..23: mol_type = other DNA
acgagcgcaatggtttgcgtcgc

SEQ ID NO: 13937 - DNA, 23 bp, synthetic construct
  misc_feature 1..23: note = Synthetic construct
  source 1..23: mol_type = other DNA
cgagcgcaatggtttgcgtcgcg

SEQ ID NO: 13938 - DNA, 23 bp, synthetic construct
  misc_feature 1..23: note = Synthetic construct
  source 1..23: mol_type = other DNA
gagcgcaatggtttgcgtcgcga

SEQ ID NO: 13939 - DNA, 23 bp, synthetic construct
  misc_feature 1..23: note = Synthetic construct
  source 1..23: mol_type = other DNA
agcgcaatggtttgcgtcgcgag

SEQ ID NO: 13940 - DNA, 23 bp, synthetic construct
  misc_feature 1..23: note = Synthetic construct
  source 1..23: mol_type = other DNA
gcgcaatggtttgcgtcgcgagt

SEQ ID NO: 13941 - DNA, 23 bp, synthetic construct
  misc_feature 1..23: note = Synthetic construct
  source 1..23: mol_type = other DNA
cgcaatggtttgcgtcgcgagtt

SEQ ID NO: 13942 - DNA, 23 bp, synthetic construct
  misc_feature 1..23: note = Synthetic construct
  source 1..23: mol_type = other DNA
gcaatggtttgcgtcgcgagttg

SEQ ID NO: 13943 - DNA, 23 bp, synthetic construct
  misc_feature 1..23: note = Synthetic construct
  source 1..23: mol_type = other DNA
caatggtttgcgtcgcgagttgt

SEQ ID NO: 13944 - DNA, 23 bp, synthetic construct
  misc_feature 1..23: note = Synthetic construct
  source 1..23: mol_type = other DNA
aatggtttgcgtcgcgagttgtg

SEQ ID NO: 13945 - DNA, 23 bp, synthetic construct
  misc_feature 1..23: note = Synthetic construct
  source 1..23: mol_type = other DNA
atggtttgcgtcgcgagttgtga

SEQ ID NO: 13946 - DNA, 23 bp, synthetic construct
  misc_feature 1..23: note = Synthetic construct
  source 1..23: mol_type = other DNA
tggtttgcgtcgcgagttgtgag

SEQ ID NO: 13947 - DNA, 23 bp, synthetic construct
  misc_feature 1..23: note = Synthetic construct
  source 1..23: mol_type = other DNA
ggtttgcgtcgcgagttgtgagg

SEQ ID NO: 13948 - DNA, 23 bp, synthetic construct
  misc_feature 1..23: note = Synthetic construct
  source 1..23: mol_type = other DNA
gtttgcgtcgcgagttgtgaggc

SEQ ID NO: 13949 - DNA, 23 bp, synthetic construct
  misc_feature 1..23: note = Synthetic construct
  source 1..23: mol_type = other DNA
tttgcgtcgcgagttgtgaggct

SEQ ID NO: 13950 - DNA, 23 bp, synthetic construct
  misc_feature 1..23: note = Synthetic construct
  source 1..23: mol_type = other DNA
ttgcgtcgcgagttgtgaggctg

SEQ ID NO: 13951 - DNA, 23 bp, synthetic construct
  misc_feature 1..23: note = Synthetic construct
  source 1..23: mol_type = other DNA
tgcgtcgcgagttgtgaggctgt

SEQ ID NO: 13952 - DNA, 23 bp, synthetic construct
  misc_feature 1..23: note = Synthetic construct
  source 1..23: mol_type = other DNA
gcgtcgcgagttgtgaggctgtc

SEQ ID NO: 13953 - DNA, 23 bp, synthetic construct
  misc_feature 1..23: note = Synthetic construct
  source 1..23: mol_type = other DNA
cgtcgcgagttgtgaggctgtcg

SEQ ID NO: 13954 - DNA, 23 bp, synthetic construct
  misc_feature 1..23: note = Synthetic construct
  source 1..23: mol_type = other DNA
gtcgcgagttgtgaggctgtcga

SEQ ID NO: 13955 - DNA, 23 bp, synthetic construct
  misc_feature 1..23: note = Synthetic construct
  source 1..23: mol_type = other DNA
tcgcgagttgtgaggctgtcgac

SEQ ID NO: 13956 - DNA, 23 bp, synthetic construct
  misc_feature 1..23: note = Synthetic construct
  source 1..23: mol_type = other DNA
cgcgagttgtgaggctgtcgacc

SEQ ID NO: 13957 - DNA, 23 bp, synthetic construct
  misc_feature 1..23: note = Synthetic construct
  source 1..23: mol_type = other DNA
gcgagttgtgaggctgtcgacct

SEQ ID NO: 13958 - DNA, 23 bp, synthetic construct
  misc_feature 1..23: note = Synthetic construct
  source 1..23: mol_type = other DNA
cgagttgtgaggctgtcgacctg

SEQ ID NO: 13959 - DNA, 23 bp, synthetic construct
  misc_feature 1..23: note = Synthetic construct
  source 1..23: mol_type = other DNA
gagttgtgaggctgtcgacctgg

SEQ ID NO: 13960 - DNA, 23 bp, synthetic construct
  misc_feature 1..23: note = Synthetic construct
  source 1..23: mol_type = other DNA
agttgtgaggctgtcgacctggc

SEQ ID NO: 13961 - DNA, 23 bp, synthetic construct
  misc_feature 1..23: note = Synthetic construct
  source 1..23: mol_type = other DNA
gttgtgaggctgtcgacctggcc

SEQ ID NO: 13962 - DNA, 23 bp, synthetic construct
  misc_feature 1..23: note = Synthetic construct
  source 1..23: mol_type = other DNA
ttgtgaggctgtcgacctggcct

SEQ ID NO: 13963 - DNA, 23 bp, synthetic construct
  misc_feature 1..23: note = Synthetic construct
  source 1..23: mol_type = other DNA
tgtgaggctgtcgacctggcctc

SEQ ID NO: 13964 - DNA, 23 bp, synthetic construct
  misc_feature 1..23: note = Synthetic construct
  source 1..23: mol_type = other DNA
gtgaggctgtcgacctggcctct

SEQ ID NO: 13965 - DNA, 23 bp, synthetic construct
  misc_feature 1..23: note = Synthetic construct
  source 1..23: mol_type = other DNA
tgaggctgtcgacctggcctctg

SEQ ID NO: 13966 - DNA, 23 bp, synthetic construct
  misc_feature 1..23: note = Synthetic construct
  source 1..23: mol_type = other DNA
gaggctgtcgacctggcctctgc

SEQ ID NO: 13967 - DNA, 23 bp, synthetic construct
  misc_feature 1..23: note = Synthetic construct
  source 1..23: mol_type = other DNA
aggctgtcgacctggcctctgct

SEQ ID NO: 13968 - DNA, 23 bp, synthetic construct
  misc_feature 1..23: note = Synthetic construct
  source 1..23: mol_type = other DNA
ggctgtcgacctggcctctgcta

SEQ ID NO: 13969 - DNA, 23 bp, synthetic construct
  misc_feature 1..23: note = Synthetic construct
  source 1..23: mol_type = other DNA
gctgtcgacctggcctctgctaa

SEQ ID NO: 13970 - DNA, 23 bp, synthetic construct
  misc_feature 1..23: note = Synthetic construct
  source 1..23: mol_type = other DNA
ctgtcgacctggcctctgctaaa

SEQ ID NO: 13971 - DNA, 23 bp, synthetic construct
  misc_feature 1..23: note = Synthetic construct
  source 1..23: mol_type = other DNA
tgtcgacctggcctctgctaaag

SEQ ID NO: 13972 - DNA, 23 bp, synthetic construct
  misc_feature 1..23: note = Synthetic construct
  source 1..23: mol_type = other DNA
gtcgacctggcctctgctaaagc

SEQ ID NO: 13973 - DNA, 23 bp, synthetic construct
  misc_feature 1..23: note = Synthetic construct
  source 1..23: mol_type = other DNA
tcgacctggcctctgctaaagca

SEQ ID NO: 13974 - DNA, 23 bp, synthetic construct
  misc_feature 1..23: note = Synthetic construct
  source 1..23: mol_type = other DNA
cgacctggcctctgctaaagcaa

SEQ ID NO: 13975 - DNA, 23 bp, synthetic construct
  misc_feature 1..23: note = Synthetic construct
  source 1..23: mol_type = other DNA
gacctggcctctgctaaagcaac

SEQ ID NO: 13976 - DNA, 23 bp, synthetic construct
  misc_feature 1..23: note = Synthetic construct
  source 1..23: mol_type = other DNA
acctggcctctgctaaagcaaca

SEQ ID NO: 13977 - DNA, 23 bp, synthetic construct
  misc_feature 1..23: note = Synthetic construct
  source 1..23: mol_type = other DNA
cctggcctctgctaaagcaacac

SEQ ID NO: 13978 - DNA, 23 bp, synthetic construct
  misc_feature 1..23: note = Synthetic construct
  source 1..23: mol_type = other DNA
ctggcctctgctaaagcaacacc

SEQ ID NO: 13979 - DNA, 23 bp, synthetic construct
  misc_feature 1..23: note = Synthetic construct
  source 1..23: mol_type = other DNA
tggcctctgctaaagcaacacca

SEQ ID NO: 13980 - DNA, 23 bp, synthetic construct
  misc_feature 1..23: note = Synthetic construct
  source 1..23: mol_type = other DNA
ggcctctgctaaagcaacaccaa

SEQ ID NO: 13981 - DNA, 23 bp, synthetic construct
  misc_feature 1..23: note = Synthetic construct
  source 1..23: mol_type = other DNA
gcctctgctaaagcaacaccaag

SEQ ID NO: 13982 - DNA, 23 bp, synthetic construct
  misc_feature 1..23: note = Synthetic construct
  source 1..23: mol_type = other DNA
cctctgctaaagcaacaccaagg

SEQ ID NO: 13983 - DNA, 23 bp, synthetic construct
  misc_feature 1..23: note = Synthetic construct
  source 1..23: mol_type = other DNA
ctctgctaaagcaacaccaaggt

SEQ ID NO: 13984 - DNA, 23 bp, synthetic construct
  misc_feature 1..23: note = Synthetic construct
  source 1..23: mol_type = other DNA
tctgctaaagcaacaccaaggtt

SEQ ID NO: 13985 - DNA, 23 bp, synthetic construct
  misc_feature 1..23: note = Synthetic construct
  source 1..23: mol_type = other DNA
ctgctaaagcaacaccaaggtta

SEQ ID NO: 13986 - DNA, 23 bp, synthetic construct
  misc_feature 1..23: note = Synthetic construct
  source 1..23: mol_type = other DNA
tgctaaagcaacaccaaggttaa

SEQ ID NO: 13987 - DNA, 23 bp, synthetic construct
  misc_feature 1..23: note = Synthetic construct
  source 1..23: mol_type = other DNA
gctaaagcaacaccaaggttaaa

SEQ ID NO: 13988 - DNA, 23 bp, synthetic construct
  misc_feature 1..23: note = Synthetic construct
  source 1..23: mol_type = other DNA
ctaaagcaacaccaaggttaaaa

SEQ ID NO: 13989 - DNA, 23 bp, synthetic construct
  misc_feature 1..23: note = Synthetic construct
  source 1..23: mol_type = other DNA
taaagcaacaccaaggttaaaat

SEQ ID NO: 13990 - DNA, 23 bp, synthetic construct
  misc_feature 1..23: note = Synthetic construct
  source 1..23: mol_type = other DNA
aaagcaacaccaaggttaaaatt

SEQ ID NO: 13991 - DNA, 23 bp, synthetic construct
  misc_feature 1..23: note = Synthetic construct
  source 1..23: mol_type = other DNA
aagcaacaccaaggttaaaatta

SEQ ID NO: 13992 - DNA, 23 bp, synthetic construct
  misc_feature 1..23: note = Synthetic construct
  source 1..23: mol_type = other DNA
agcaacaccaaggttaaaattac

SEQ ID NO: 13993 - DNA, 23 bp, synthetic construct
  misc_feature 1..23: note = Synthetic construct
  source 1..23: mol_type = other DNA
gcaacaccaaggttaaaattacc

SEQ ID NO: 13994 - DNA, 23 bp, synthetic construct
  misc_feature 1..23: note = Synthetic construct
  source 1..23: mol_type = other DNA
caacaccaaggttaaaattaccc

SEQ ID NO: 13995 - DNA, 23 bp, synthetic construct
  misc_feature 1..23: note = Synthetic construct
  source 1..23: mol_type = other DNA
aacaccaaggttaaaattaccct

SEQ ID NO: 13996 - DNA, 23 bp, synthetic construct
  misc_feature 1..23: note = Synthetic construct
  source 1..23: mol_type = other DNA
acaccaaggttaaaattaccctg

SEQ ID NO: 13997 - DNA, 23 bp, synthetic construct
  misc_feature 1..23: note = Synthetic construct
  source 1..23: mol_type = other DNA
caccaaggttaaaattaccctgg

SEQ ID NO: 13998 - DNA, 23 bp, synthetic construct
  misc_feature 1..23: note = Synthetic construct
  source 1..23: mol_type = other DNA
accaaggttaaaattaccctggg

SEQ ID NO: 13999 - DNA, 23 bp, synthetic construct
  misc_feature 1..23: note = Synthetic construct
  source 1..23: mol_type = other DNA
ccaaggttaaaattaccctgggt

SEQ ID NO: 14000 - DNA, 23 bp, synthetic construct
  misc_feature 1..23: note = Synthetic construct
  source 1..23: mol_type = other DNA
caaggttaaaattaccctgggtg

SEQ ID NO: 14001 - DNA, 23 bp, synthetic construct
  misc_feature 1..23: note = Synthetic construct
  source 1..23: mol_type = other DNA
aaggttaaaattaccctgggtga

SEQ ID NO: 14002 - DNA, 23 bp, synthetic construct
  misc_feature 1..23: note = Synthetic construct
  source 1..23: mol_type = other DNA
aggttaaaattaccctgggtgac

SEQ ID NO: 14003 - DNA, 23 bp, synthetic construct
  misc_feature 1..23: note = Synthetic construct
  source 1..23: mol_type = other DNA
ggttaaaattaccctgggtgacc

SEQ ID NO: 14004 - DNA, 23 bp, synthetic construct
  misc_feature 1..23: note = Synthetic construct
  source 1..23: mol_type = other DNA
gttaaaattaccctgggtgacct

SEQ ID NO: 14005 - DNA, 23 bp, synthetic construct
  misc_feature 1..23: note = Synthetic construct
  source 1..23: mol_type = other DNA
ttaaaattaccctgggtgacctt

SEQ ID NO: 14006 - DNA, 23 bp, synthetic construct
  misc_feature 1..23: note = Synthetic construct
  source 1..23: mol_type = other DNA
taaaattaccctgggtgaccttt

SEQ ID NO: 14007 - DNA, 23 bp, synthetic construct
  misc_feature 1..23: note = Synthetic construct
  source 1..23: mol_type = other DNA
aaaattaccctgggtgacctttt

SEQ ID NO: 14008 - DNA, 23 bp, synthetic construct
  misc_feature 1..23: note = Synthetic construct
  source 1..23: mol_type = other DNA
aaattaccctgggtgaccttttg

SEQ ID NO: 14009 - DNA, 23 bp, synthetic construct
  misc_feature 1..23: note = Synthetic construct
  source 1..23: mol_type = other DNA
aattaccctgggtgaccttttgc

SEQ ID NO: 14010 - DNA, 23 bp, synthetic construct
  misc_feature 1..23: note = Synthetic construct
  source 1..23: mol_type = other DNA
attaccctgggtgaccttttgca

SEQ ID NO: 14011 - DNA, 23 bp, synthetic construct
  misc_feature 1..23: note = Synthetic construct
  source 1..23: mol_type = other DNA
ttaccctgggtgaccttttgcag

SEQ ID NO: 14012 - DNA, 23 bp, synthetic construct
  misc_feature 1..23: note = Synthetic construct
  source 1..23: mol_type = other DNA
taccctgggtgaccttttgcagg

SEQ ID NO: 14013 - DNA, 23 bp, synthetic construct
  misc_feature 1..23: note = Synthetic construct
  source 1..23: mol_type = other DNA
accctgggtgaccttttgcagga

SEQ ID NO: 14014 - DNA, 23 bp, synthetic construct
  misc_feature 1..23: note = Synthetic construct
  source 1..23: mol_type = other DNA
ccctgggtgaccttttgcaggac

SEQ ID NO: 14015 - DNA, 23 bp, synthetic construct
  misc_feature 1..23: note = Synthetic construct
  source 1..23: mol_type = other DNA
cctgggtgaccttttgcaggact

SEQ ID NO: 14016 - DNA, 23 bp, synthetic construct
  misc_feature 1..23: note = Synthetic construct
  source 1..23: mol_type = other DNA
ctgggtgaccttttgcaggactt

SEQ ID NO: 14017 - DNA, 23 bp, synthetic construct
  misc_feature 1..23: note = Synthetic construct
  source 1..23: mol_type = other DNA
tgggtgaccttttgcaggacttc

SEQ ID NO: 14018 - DNA, 23 bp, synthetic construct
  misc_feature 1..23: note = Synthetic construct
  source 1..23: mol_type = other DNA
gggtgaccttttgcaggacttcg

SEQ ID NO: 14019 - DNA, 23 bp, synthetic construct
  misc_feature 1..23: note = Synthetic construct
  source 1..23: mol_type = other DNA
ggtgaccttttgcaggacttcgg

SEQ ID NO: 14020 - DNA, 23 bp, synthetic construct
  misc_feature 1..23: note = Synthetic construct
  source 1..23: mol_type = other DNA
gtgaccttttgcaggacttcggt

SEQ ID NO: 14021 - DNA, 23 bp, synthetic construct
  misc_feature 1..23: note = Synthetic construct
  source 1..23: mol_type = other DNA
tgaccttttgcaggacttcggtc

SEQ ID NO: 14022 - DNA, 23 bp, synthetic construct
  misc_feature 1..23: note = Synthetic construct
  source 1..23: mol_type = other DNA
gaccttttgcaggacttcggtcg

SEQ ID NO: 14023 - DNA, 23 bp, synthetic construct
  misc_feature 1..23: note = Synthetic construct
  source 1..23: mol_type = other DNA
accttttgcaggacttcggtcga

SEQ ID NO: 14024 - DNA, 23 bp, synthetic construct
  misc_feature 1..23: note = Synthetic construct
  source 1..23: mol_type = other DNA
ccttttgcaggacttcggtcgac

SEQ ID NO: 14025 - DNA, 23 bp, synthetic construct
  misc_feature 1..23: note = Synthetic construct
  source 1..23: mol_type = other DNA
cttttgcaggacttcggtcgacg

SEQ ID NO: 14026 - DNA, 23 bp, synthetic construct
  misc_feature 1..23: note = Synthetic construct
  source 1..23: mol_type = other DNA
ttttgcaggacttcggtcgacgc

SEQ ID NO: 14027 - DNA, 23 bp, synthetic construct
  misc_feature 1..23: note = Synthetic construct
  source 1..23: mol_type = other DNA
tttgcaggacttcggtcgacgcc

SEQ ID NO: 14028 - DNA, 23 bp, synthetic construct
  misc_feature 1..23: note = Synthetic construct
  source 1..23: mol_type = other DNA
ttgcaggacttcggtcgacgccc

SEQ ID NO: 14029 - DNA, 23 bp, synthetic construct
  misc_feature 1..23: note = Synthetic construct
  source 1..23: mol_type = other DNA
tgcaggacttcggtcgacgcccg

SEQ ID NO: 14030 - DNA, 23 bp, synthetic construct
  misc_feature 1..23: note = Synthetic construct
  source 1..23: mol_type = other DNA
gcaggacttcggtcgacgcccgg

SEQ ID NO: 14031 - DNA, 23 bp, synthetic construct
  misc_feature 1..23: note = Synthetic construct
  source 1..23: mol_type = other DNA
caggacttcggtcgacgcccggt

SEQ ID NO: 14032 - DNA, 23 bp, synthetic construct
  misc_feature 1..23: note = Synthetic construct
  source 1..23: mol_type = other DNA
aggacttcggtcgacgcccggtt

SEQ ID NO: 14033 - DNA, 23 bp, synthetic construct
  misc_feature 1..23: note = Synthetic construct
  source 1..23: mol_type = other DNA
ggacttcggtcgacgcccggttc

SEQ ID NO: 14034 - DNA, 23 bp, synthetic construct
  misc_feature 1..23: note = Synthetic construct
  source 1..23: mol_type = other DNA
gacttcggtcgacgcccggttcg

SEQ ID NO: 14035 - DNA, 23 bp, synthetic construct
  misc_feature 1..23: note = Synthetic construct
  source 1..23: mol_type = other DNA
acttcggtcgacgcccggttcgc

SEQ ID NO: 14036 - DNA, 23 bp, synthetic construct
  misc_feature 1..23: note = Synthetic construct
  source 1..23: mol_type = other DNA
cttcggtcgacgcccggttcgca

SEQ ID NO: 14037 - DNA, 23 bp, synthetic construct
  misc_feature 1..23: note = Synthetic construct
  source 1..23: mol_type = other DNA
ttcggtcgacgcccggttcgcaa

SEQ ID NO: 14038 - DNA, 23 bp, synthetic construct
  misc_feature 1..23: note = Synthetic construct
  source 1..23: mol_type = other DNA
tcggtcgacgcccggttcgcaac

SEQ ID NO: 14039 - DNA, 23 bp, synthetic construct
  misc_feature 1..23: note = Synthetic construct
  source 1..23: mol_type = other DNA
cggtcgacgcccggttcgcaacg

SEQ ID NO: 14040 - DNA, 23 bp, synthetic construct
  misc_feature 1..23: note = Synthetic construct
  source 1..23: mol_type = other DNA
ggtcgacgcccggttcgcaacgt

SEQ ID NO: 14041 - DNA, 23 bp, synthetic construct
  misc_feature 1..23: note = Synthetic construct
  source 1..23: mol_type = other DNA
gtcgacgcccggttcgcaacgtt

SEQ ID NO: 14042 - DNA, 23 bp, synthetic construct
  misc_feature 1..23: note = Synthetic construct
  source 1..23: mol_type = other DNA
tcgacgcccggttcgcaacgttc

SEQ ID NO: 14043 - DNA, 23 bp, synthetic construct
  misc_feature 1..23: note = Synthetic construct
  source 1..23: mol_type = other DNA
cgacgcccggttcgcaacgttct

SEQ ID NO: 14044 - DNA, 23 bp, synthetic construct
  misc_feature 1..23: note = Synthetic construct
  source 1..23: mol_type = other DNA
gacgcccggttcgcaacgttctg

SEQ ID NO: 14045 - DNA, 23 bp, synthetic construct
  misc_feature 1..23: note = Synthetic construct
  source 1..23: mol_type = other DNA
acgcccggttcgcaacgttctgc

SEQ ID NO: 14046 - DNA, 23 bp, synthetic construct
  misc_feature 1..23: note = Synthetic construct
  source 1..23: mol_type = other DNA
cgcccggttcgcaacgttctgcg

SEQ ID NO: 14047 - DNA, 23 bp, synthetic construct
  misc_feature 1..23: note = Synthetic construct
  source 1..23: mol_type = other DNA
gcccggttcgcaacgttctgcgg

SEQ ID NO: 14048 - DNA, 23 bp, synthetic construct
  misc_feature 1..23: note = Synthetic construct
  source 1..23: mol_type = other DNA
cccggttcgcaacgttctgcggc

SEQ ID NO: 14049 - DNA, 23 bp, synthetic construct
  misc_feature 1..23: note = Synthetic construct
  source 1..23: mol_type = other DNA
ccggttcgcaacgttctgcggca

SEQ ID NO: 14050 - DNA, 23 bp, synthetic construct
  misc_feature 1..23: note = Synthetic construct
  source 1..23: mol_type = other DNA
cggttcgcaacgttctgcggcac

SEQ ID NO: 14051 - DNA, 23 bp, synthetic construct
  misc_feature 1..23: note = Synthetic construct
  source 1..23: mol_type = other DNA
ggttcgcaacgttctgcggcact

SEQ ID NO: 14052 - DNA, 23 bp, synthetic construct
  misc_feature 1..23: note = Synthetic construct
  source 1..23: mol_type = other DNA
gttcgcaacgttctgcggcactt

SEQ ID NO: 14053 - DNA, 23 bp, synthetic construct
  misc_feature 1..23: note = Synthetic construct
  source 1..23: mol_type = other DNA
ttcgcaacgttctgcggcacttc

SEQ ID NO: 14054 - DNA, 23 bp, synthetic construct
  misc_feature 1..23: note = Synthetic construct
  source 1..23: mol_type = other DNA
tcgcaacgttctgcggcacttcg

SEQ ID NO: 14055 - DNA, 23 bp, synthetic construct
  misc_feature 1..23: note = Synthetic construct
  source 1..23: mol_type = other DNA
cgcaacgttctgcggcacttcga

SEQ ID NO: 14056 - DNA, 23 bp, synthetic construct
  misc_feature 1..23: note = Synthetic construct
  source 1..23: mol_type = other DNA
gcaacgttctgcggcacttcgat

SEQ ID NO: 14057 - DNA, 23 bp, synthetic construct
  misc_feature 1..23: note = Synthetic construct
  source 1..23: mol_type = other DNA
caacgttctgcggcacttcgatg

SEQ ID NO: 14058 - DNA, 23 bp, synthetic construct
  misc_feature 1..23: note = Synthetic construct
  source 1..23: mol_type = other DNA
aacgttctgcggcacttcgatgt

SEQ ID NO: 14059 - DNA, 23 bp, synthetic construct
  misc_feature 1..23: note = Synthetic construct
  source 1..23: mol_type = other DNA
acgttctgcggcacttcgatgta

SEQ ID NO: 14060 - DNA, 23 bp, synthetic construct
  misc_feature 1..23: note = Synthetic construct
  source 1..23: mol_type = other DNA
cgttctgcggcacttcgatgtaa

SEQ ID NO: 14061 - DNA, 23 bp, synthetic construct
  misc_feature 1..23: note = Synthetic construct
  source 1..23: mol_type = other DNA
gttctgcggcacttcgatgtaag

SEQ ID NO: 14062 - DNA, 23 bp, synthetic construct
  misc_feature 1..23: note = Synthetic construct
  source 1..23: mol_type = other DNA
ttctgcggcacttcgatgtaagt

SEQ ID NO: 14063 - DNA, 23 bp, synthetic construct
  misc_feature 1..23: note = Synthetic construct
  source 1..23: mol_type = other DNA
tctgcggcacttcgatgtaagtc

SEQ ID NO: 14064 - DNA, 23 bp, synthetic construct
  misc_feature 1..23: note = Synthetic construct
  source 1..23: mol_type = other DNA
ctgcggcacttcgatgtaagtca

SEQ ID NO: 14065 - DNA, 23 bp, synthetic construct
  misc_feature 1..23: note = Synthetic construct
  source 1..23: mol_type = other DNA
tgcggcacttcgatgtaagtcaa

SEQ ID NO: 14066 - DNA, 23 bp, synthetic construct
  misc_feature 1..23: note = Synthetic construct
  source 1..23: mol_type = other DNA
gcggcacttcgatgtaagtcaag

SEQ ID NO: 14067 - DNA, 23 bp, synthetic construct
  misc_feature 1..23: note = Synthetic construct
  source 1..23: mol_type = other DNA
cggcacttcgatgtaagtcaagt

SEQ ID NO: 14068 - DNA, 23 bp, synthetic construct
  misc_feature 1..23: note = Synthetic construct
  source 1..23: mol_type = other DNA
ggcacttcgatgtaagtcaagtt

SEQ ID NO: 14069 - DNA, 23 bp, synthetic construct
  misc_feature 1..23: note = Synthetic construct
  source 1..23: mol_type = other DNA
gcacttcgatgtaagtcaagttt

SEQ ID NO: 14070 - DNA, 23 bp, synthetic construct
  misc_feature 1..23: note = Synthetic construct
  source 1..23: mol_type = other DNA
cacttcgatgtaagtcaagtttt

SEQ ID NO: 14071 - DNA, 23 bp, synthetic construct
  misc_feature 1..23: note = Synthetic construct
  source 1..23: mol_type = other DNA
acttcgatgtaagtcaagttttg

SEQ ID NO: 14072 - DNA, 23 bp, synthetic construct
  misc_feature 1..23: note = Synthetic construct
  source 1..23: mol_type = other DNA
cttcgatgtaagtcaagttttgg

SEQ ID NO: 14073 - DNA, 23 bp, synthetic construct
  misc_feature 1..23: note = Synthetic construct
  source 1..23: mol_type = other DNA
ttcgatgtaagtcaagttttggc

SEQ ID NO: 14074 - DNA, 23 bp, synthetic construct
  misc_feature 1..23: note = Synthetic construct
  source 1..23: mol_type = other DNA
tcgatgtaagtcaagttttggct

SEQ ID NO: 14075 - DNA, 23 bp, synthetic construct
  misc_feature 1..23: note = Synthetic construct
  source 1..23: mol_type = other DNA
cgatgtaagtcaagttttggctt

SEQ ID NO: 14076 - DNA, 23 bp, synthetic construct
  misc_feature 1..23: note = Synthetic construct
  source 1..23: mol_type = other DNA
gatgtaagtcaagttttggctta

SEQ ID NO: 14077 - DNA, 23 bp, synthetic construct
  misc_feature 1..23: note = Synthetic construct
  source 1..23: mol_type = other DNA
atgtaagtcaagttttggcttac

SEQ ID NO: 14078 - DNA, 23 bp, synthetic construct
  misc_feature 1..23: note = Synthetic construct
  source 1..23: mol_type = other DNA
tgtaagtcaagttttggcttaca

SEQ ID NO: 14079 - DNA, 23 bp, synthetic construct
  misc_feature 1..23: note = Synthetic construct
  source 1..23: mol_type = other DNA
gtaagtcaagttttggcttacag

SEQ ID NO: 14080 - DNA, 23 bp, synthetic construct
  misc_feature 1..23: note = Synthetic construct
  source 1..23: mol_type = other DNA
taagtcaagttttggcttacagg

SEQ ID NO: 14081 - DNA, 23 bp, synthetic construct
  misc_feature 1..23: note = Synthetic construct
  source 1..23: mol_type = other DNA
aagtcaagttttggcttacaggg

SEQ ID NO: 14082 - DNA, 23 bp, synthetic construct
  misc_feature 1..23: note = Synthetic construct
  source 1..23: mol_type = other DNA
agtcaagttttggcttacaggga

SEQ ID NO: 14083 - DNA, 23 bp, synthetic construct
  misc_feature 1..23: note = Synthetic construct
  source 1..23: mol_type = other DNA
gtcaagttttggcttacagggaa

SEQ ID NO: 14084 - DNA, 23 bp, synthetic construct
  misc_feature 1..23: note = Synthetic construct
  source 1..23: mol_type = other DNA
tcaagttttggcttacagggaag

SEQ ID NO: 14085 - DNA, 23 bp, synthetic construct
  misc_feature 1..23: note = Synthetic construct
  source 1..23: mol_type = other DNA
caagttttggcttacagggaaga

SEQ ID NO: 14086 - DNA, 23 bp, synthetic construct
  misc_feature 1..23: note = Synthetic construct
  source 1..23: mol_type = other DNA
aagttttggcttacagggaagag

SEQ ID NO: 14087 - DNA, 23 bp, synthetic construct
  misc_feature 1..23: note = Synthetic construct
  source 1..23: mol_type = other DNA
agttttggcttacagggaagagg

SEQ ID NO: 14088 - DNA, 23 bp, synthetic construct
  misc_feature 1..23: note = Synthetic construct
  source 1..23: mol_type = other DNA
gttttggcttacagggaagaggc

SEQ ID NO: 14089 - DNA, 23 bp, synthetic construct
  misc_feature 1..23: note = Synthetic construct
  source 1..23: mol_type = other DNA
ttttggcttacagggaagaggct

SEQ ID NO: 14090 - DNA, 23 bp, synthetic construct
  misc_feature 1..23: note = Synthetic construct
  source 1..23: mol_type = other DNA
tttggcttacagggaagaggctg

SEQ ID NO: 14091 - DNA, 23 bp, synthetic construct
  misc_feature 1..23: note = Synthetic construct
  source 1..23: mol_type = other DNA
ttggcttacagggaagaggctgt

SEQ ID NO: 14092 - DNA, 23 bp, synthetic construct
  misc_feature 1..23: note = Synthetic construct
  source 1..23: mol_type = other DNA
tggcttacagggaagaggctgta

SEQ ID NO: 14093 - DNA, 23 bp, synthetic construct
  misc_feature 1..23: note = Synthetic construct
  source 1..23: mol_type = other DNA
ggcttacagggaagaggctgtag

SEQ ID NO: 14094 - DNA, 23 bp, synthetic construct
  misc_feature 1..23: note = Synthetic construct
  source 1..23: mol_type = other DNA
gcttacagggaagaggctgtagc

SEQ ID NO: 14095 - DNA, 23 bp, synthetic construct
  misc_feature 1..23: note = Synthetic construct
  source 1..23: mol_type = other DNA
cttacagggaagaggctgtagca

SEQ ID NO: 14096 - DNA, 23 bp, synthetic construct
  misc_feature 1..23: note = Synthetic construct
  source 1..23: mol_type = other DNA
ttacagggaagaggctgtagcag

SEQ ID NO: 14097 - DNA, 23 bp, synthetic construct
  misc_feature 1..23: note = Synthetic construct
  source 1..23: mol_type = other DNA
tacagggaagaggctgtagcagg

SEQ ID NO: 14098 - DNA, 23 bp, synthetic construct
  misc_feature 1..23: note = Synthetic construct
  source 1..23: mol_type = other DNA
acagggaagaggctgtagcagga

SEQ ID NO: 14099 - DNA, 23 bp, synthetic construct
  misc_feature 1..23: note = Synthetic construct
  source 1..23: mol_type = other DNA
cagggaagaggctgtagcaggag

SEQ ID NO: 14100 - DNA, 23 bp, synthetic construct
  misc_feature 1..23: note = Synthetic construct
  source 1..23: mol_type = other DNA
agggaagaggctgtagcaggagc

SEQ ID NO: 14101 - DNA, 23 bp, synthetic construct
  misc_feature 1..23: note = Synthetic construct
  source 1..23: mol_type = other DNA
gggaagaggctgtagcaggagcg

SEQ ID NO: 14102 - DNA, 23 bp, synthetic construct
  misc_feature 1..23: note = Synthetic construct
  source 1..23: mol_type = other DNA
ggaagaggctgtagcaggagcgt

SEQ ID NO: 14103 - DNA, 23 bp, synthetic construct
  misc_feature 1..23: note = Synthetic construct
  source 1..23: mol_type = other DNA
gaagaggctgtagcaggagcgtg

SEQ ID NO: 14104 - DNA, 23 bp, synthetic construct
  misc_feature 1..23: note = Synthetic construct
  source 1..23: mol_type = other DNA
aagaggctgtagcaggagcgtgc

SEQ ID NO: 14105 - DNA, 23 bp, synthetic construct
  misc_feature 1..23: note = Synthetic construct
  source 1..23: mol_type = other DNA
agaggctgtagcaggagcgtgcg

SEQ ID NO: 14106 - DNA, 23 bp, synthetic construct
  misc_feature 1..23: note = Synthetic construct
  source 1..23: mol_type = other DNA
gaggctgtagcaggagcgtgcgt

SEQ ID NO: 14107 - DNA, 23 bp, synthetic construct
  misc_feature 1..23: note = Synthetic construct
  source 1..23: mol_type = other DNA
aggctgtagcaggagcgtgcgtc

SEQ ID NO: 14108 - DNA, 23 bp, synthetic construct
  misc_feature 1..23: note = Synthetic construct
  source 1..23: mol_type = other DNA
ggctgtagcaggagcgtgcgtcg

SEQ ID NO: 14109 - DNA, 23 bp, synthetic construct
  misc_feature 1..23: note = Synthetic construct
  source 1..23: mol_type = other DNA
gctgtagcaggagcgtgcgtcga

SEQ ID NO: 14110 - DNA, 23 bp, synthetic construct
  misc_feature 1..23: note = Synthetic construct
  source 1..23: mol_type = other DNA
ctgtagcaggagcgtgcgtcgag

SEQ ID NO: 14111 - DNA, 23 bp, synthetic construct
  misc_feature 1..23: note = Synthetic construct
  source 1..23: mol_type = other DNA
tgtagcaggagcgtgcgtcgagg

SEQ ID NO: 14112 - DNA, 23 bp, synthetic construct
  misc_feature 1..23: note = Synthetic construct
  source 1..23: mol_type = other DNA
gtagcaggagcgtgcgtcgaggg

SEQ ID NO: 14113 - DNA, 23 bp, synthetic construct
  misc_feature 1..23: note = Synthetic construct
  source 1..23: mol_type = other DNA
tagcaggagcgtgcgtcgaggga

SEQ ID NO: 14114 - DNA, 23 bp, synthetic construct
  misc_feature 1..23: note = Synthetic construct
  source 1..23: mol_type = other DNA
agcaggagcgtgcgtcgagggag

SEQ ID NO: 14115 - DNA, 23 bp, synthetic construct
  misc_feature 1..23: note = Synthetic construct
  source 1..23: mol_type = other DNA
gcaggagcgtgcgtcgagggaga

SEQ ID NO: 14116 - DNA, 23 bp, synthetic construct
  misc_feature 1..23: note = Synthetic construct
  source 1..23: mol_type = other DNA
caggagcgtgcgtcgagggagaa

SEQ ID NO: 14117 - DNA, 23 bp, synthetic construct
  misc_feature 1..23: note = Synthetic construct
  source 1..23: mol_type = other DNA
aggagcgtgcgtcgagggagaag

SEQ ID NO: 14118 - DNA, 23 bp, synthetic construct
  misc_feature 1..23: note = Synthetic construct
  source 1..23: mol_type = other DNA
ggagcgtgcgtcgagggagaagc

SEQ ID NO: 14119 - DNA, 23 bp, synthetic construct
  misc_feature 1..23: note = Synthetic construct
  source 1..23: mol_type = other DNA
gagcgtgcgtcgagggagaagcc

SEQ ID NO: 14120 - DNA, 23 bp, synthetic construct
  misc_feature 1..23: note = Synthetic construct
  source 1..23: mol_type = other DNA
agcgtgcgtcgagggagaagccg

SEQ ID NO: 14121 - DNA, 23 bp, synthetic construct
  misc_feature 1..23: note = Synthetic construct
  source 1..23: mol_type = other DNA
gcgtgcgtcgagggagaagccga

SEQ ID NO: 14122 - DNA, 23 bp, synthetic construct
  misc_feature 1..23: note = Synthetic construct
  source 1..23: mol_type = other DNA
cgtgcgtcgagggagaagccgaa

SEQ ID NO: 14123 - DNA, 23 bp, synthetic construct
  misc_feature 1..23: note = Synthetic construct
  source 1..23: mol_type = other DNA
gtgcgtcgagggagaagccgaaa

SEQ ID NO: 14124 - DNA, 23 bp, synthetic construct
  misc_feature 1..23: note = Synthetic construct
  source 1..23: mol_type = other DNA
tgcgtcgagggagaagccgaaac

SEQ ID NO: 14125 - DNA, 23 bp, synthetic construct
  misc_feature 1..23: note = Synthetic construct
  source 1..23: mol_type = other DNA
gcgtcgagggagaagccgaaacc

SEQ ID NO: 14126 - DNA, 23 bp, synthetic construct
  misc_feature 1..23: note = Synthetic construct
  source 1..23: mol_type = other DNA
cgtcgagggagaagccgaaaccg

SEQ ID NO: 14127 - DNA, 23 bp, synthetic construct
  misc_feature 1..23: note = Synthetic construct
  source 1..23: mol_type = other DNA
gtcgagggagaagccgaaaccgg

SEQ ID NO: 14128 - DNA, 23 bp, synthetic construct
  misc_feature 1..23: note = Synthetic construct
  source 1..23: mol_type = other DNA
tcgagggagaagccgaaaccggc

SEQ ID NO: 14129 - DNA, 23 bp, synthetic construct
  misc_feature 1..23: note = Synthetic construct
  source 1..23: mol_type = other DNA
cgagggagaagccgaaaccggct

SEQ ID NO: 14130 - DNA, 23 bp, synthetic construct
  misc_feature 1..23: note = Synthetic construct
  source 1..23: mol_type = other DNA
gagggagaagccgaaaccggctt

SEQ ID NO: 14131 - DNA, 23 bp, synthetic construct
  misc_feature 1..23: note = Synthetic construct
  source 1..23: mol_type = other DNA
agggagaagccgaaaccggcttt

SEQ ID NO: 14132 - DNA, 23 bp, synthetic construct
  misc_feature 1..23: note = Synthetic construct
  source 1..23: mol_type = other DNA
gggagaagccgaaaccggctttc

SEQ ID NO: 14133 - DNA, 23 bp, synthetic construct
  misc_feature 1..23: note = Synthetic construct
  source 1..23: mol_type = other DNA
ggagaagccgaaaccggctttct

SEQ ID NO: 14134 - DNA, 23 bp, synthetic construct
  misc_feature 1..23: note = Synthetic construct
  source 1..23: mol_type = other DNA
gagaagccgaaaccggctttctc

SEQ ID NO: 14135 - DNA, 23 bp, synthetic construct
  misc_feature 1..23: note = Synthetic construct
  source 1..23: mol_type = other DNA
agaagccgaaaccggctttctcc

SEQ ID NO: 14136 - DNA, 23 bp, synthetic construct
  misc_feature 1..23: note = Synthetic construct
  source 1..23: mol_type = other DNA
gaagccgaaaccggctttctcct

SEQ ID NO: 14137 - DNA, 23 bp, synthetic construct
  misc_feature 1..23: note = Synthetic construct
  source 1..23: mol_type = other DNA
aagccgaaaccggctttctcctc

SEQ ID NO: 14138 - DNA, 23 bp, synthetic construct
  misc_feature 1..23: note = Synthetic construct
  source 1..23: mol_type = other DNA
agccgaaaccggctttctcctcg

SEQ ID NO: 14139 - DNA, 23 bp, synthetic construct
  misc_feature 1..23: note = Synthetic construct
  source 1..23: mol_type = other DNA
gccgaaaccggctttctcctcgt

SEQ ID NO: 14140 - DNA, 23 bp, synthetic construct
  misc_feature 1..23: note = Synthetic construct
  source 1..23: mol_type = other DNA
ccgaaaccggctttctcctcgta

SEQ ID NO: 14141 - DNA, 23 bp, synthetic construct
  misc_feature 1..23: note = Synthetic construct
  source 1..23: mol_type = other DNA
cgaaaccggctttctcctcgtac

SEQ ID NO: 14142 - DNA, 23 bp, synthetic construct
  misc_feature 1..23: note = Synthetic construct
  source 1..23: mol_type = other DNA
gaaaccggctttctcctcgtacg

SEQ ID NO: 14143 - DNA, 23 bp, synthetic construct
  misc_feature 1..23: note = Synthetic construct
  source 1..23: mol_type = other DNA
aaaccggctttctcctcgtacgg

SEQ ID NO: 14144 - DNA, 23 bp, synthetic construct
  misc_feature 1..23: note = Synthetic construct
  source 1..23: mol_type = other DNA
aaccggctttctcctcgtacggg

SEQ ID NO: 14145 - DNA, 23 bp, synthetic construct
  misc_feature 1..23: note = Synthetic construct
  source 1..23: mol_type = other DNA
accggctttctcctcgtacgggc

SEQ ID NO: 14146 - DNA, 23 bp, synthetic construct
  misc_feature 1..23: note = Synthetic construct
  source 1..23: mol_type = other DNA
ccggctttctcctcgtacgggcg

SEQ ID NO: 14147 - DNA, 23 bp, synthetic construct
  misc_feature 1..23: note = Synthetic construct
  source 1..23: mol_type = other DNA
cggctttctcctcgtacgggcga

SEQ ID NO: 14148 - DNA, 23 bp, synthetic construct
  misc_feature 1..23: note = Synthetic construct
  source 1..23: mol_type = other DNA
ggctttctcctcgtacgggcgac

SEQ ID NO: 14149 - DNA, 23 bp, synthetic construct
  misc_feature 1..23: note = Synthetic construct
  source 1..23: mol_type = other DNA
gctttctcctcgtacgggcgacc

SEQ ID NO: 14150 - DNA, 23 bp, synthetic construct
  misc_feature 1..23: note = Synthetic construct
  source 1..23: mol_type = other DNA
ctttctcctcgtacgggcgaccc

SEQ ID NO: 14151 - DNA, 23 bp, synthetic construct
  misc_feature 1..23: note = Synthetic construct
  source 1..23: mol_type = other DNA
tttctcctcgtacgggcgacccc

SEQ ID NO: 14152 - DNA, 23 bp, synthetic construct
  misc_feature 1..23: note = Synthetic construct
  source 1..23: mol_type = other DNA
ttctcctcgtacgggcgacccca

SEQ ID NO: 14153 - DNA, 23 bp, synthetic construct
  misc_feature 1..23: note = Synthetic construct
  source 1..23: mol_type = other DNA
tctcctcgtacgggcgaccccac

SEQ ID NO: 14154 - DNA, 23 bp, synthetic construct
  misc_feature 1..23: note = Synthetic construct
  source 1..23: mol_type = other DNA
ctcctcgtacgggcgaccccacg

SEQ ID NO: 14155 - DNA, 23 bp, synthetic construct
  misc_feature 1..23: note = Synthetic construct
  source 1..23: mol_type = other DNA
tcctcgtacgggcgaccccacga

SEQ ID NO: 14156 - DNA, 23 bp, synthetic construct
  misc_feature 1..23: note = Synthetic construct
  source 1..23: mol_type = other DNA
cctcgtacgggcgaccccacgat

SEQ ID NO: 14157 - DNA, 23 bp, synthetic construct
  misc_feature 1..23: note = Synthetic construct
  source 1..23: mol_type = other DNA
ctcgtacgggcgaccccacgatg

SEQ ID NO: 14158 - DNA, 23 bp, synthetic construct
  misc_feature 1..23: note = Synthetic construct
  source 1..23: mol_type = other DNA
tcgtacgggcgaccccacgatga

SEQ ID NO: 14159 - DNA, 23 bp, synthetic construct
  misc_feature 1..23: note = Synthetic construct
  source 1..23: mol_type = other DNA
cgtacgggcgaccccacgatgac

SEQ ID NO: 14160 - DNA, 23 bp, synthetic construct
  misc_feature 1..23: note = Synthetic construct
  source 1..23: mol_type = other DNA
gtacgggcgaccccacgatgacc

SEQ ID NO: 14161 - DNA, 23 bp, synthetic construct
  misc_feature 1..23: note = Synthetic construct
  source 1..23: mol_type = other DNA
tacgggcgaccccacgatgaccc

SEQ ID NO: 14162 - DNA, 23 bp, synthetic construct
  misc_feature 1..23: note = Synthetic construct
  source 1..23: mol_type = other DNA
acgggcgaccccacgatgaccca

SEQ ID NO: 14163 - DNA, 23 bp, synthetic construct
  misc_feature 1..23: note = Synthetic construct
  source 1..23: mol_type = other DNA
cgggcgaccccacgatgacccac

SEQ ID NO: 14164 - DNA, 23 bp, synthetic construct
  misc_feature 1..23: note = Synthetic construct
  source 1..23: mol_type = other DNA
gggcgaccccacgatgacccact

SEQ ID NO: 14165 - DNA, 23 bp, synthetic construct
  misc_feature 1..23: note = Synthetic construct
  source 1..23: mol_type = other DNA
ggcgaccccacgatgacccactt

SEQ ID NO: 14166 - DNA, 23 bp, synthetic construct
  misc_feature 1..23: note = Synthetic construct
  source 1..23: mol_type = other DNA
gcgaccccacgatgacccacttc

SEQ ID NO: 14167 - DNA, 23 bp, synthetic construct
  misc_feature 1..23: note = Synthetic construct
  source 1..23: mol_type = other DNA
cgaccccacgatgacccacttcg

SEQ ID NO: 14168 - DNA, 23 bp, synthetic construct
  misc_feature 1..23: note = Synthetic construct
  source 1..23: mol_type = other DNA
gaccccacgatgacccacttcgc

SEQ ID NO: 14169 - DNA, 23 bp, synthetic construct
  misc_feature 1..23: note = Synthetic construct
  source 1..23: mol_type = other DNA
accccacgatgacccacttcgct

SEQ ID NO: 14170 - DNA, 23 bp, synthetic construct
  misc_feature 1..23: note = Synthetic construct
  source 1..23: mol_type = other DNA
ccccacgatgacccacttcgctt

SEQ ID NO: 14171 - DNA, 23 bp, synthetic construct
  misc_feature 1..23: note = Synthetic construct
  source 1..23: mol_type = other DNA
cccacgatgacccacttcgcttg

SEQ ID NO: 14172 - DNA, 23 bp, synthetic construct
  misc_feature 1..23: note = Synthetic construct
  source 1..23: mol_type = other DNA
ccacgatgacccacttcgcttgt

SEQ ID NO: 14173 - DNA, 23 bp, synthetic construct
  misc_feature 1..23: note = Synthetic construct
  source 1..23: mol_type = other DNA
cacgatgacccacttcgcttgta

SEQ ID NO: 14174 - DNA, 23 bp, synthetic construct
  misc_feature 1..23: note = Synthetic construct
  source 1..23: mol_type = other DNA
acgatgacccacttcgcttgtag

SEQ ID NO: 14175 - DNA, 23 bp, synthetic construct
  misc_feature 1..23: note = Synthetic construct
  source 1..23: mol_type = other DNA
cgatgacccacttcgcttgtagg

SEQ ID NO: 14176 - DNA, 23 bp, synthetic construct
  misc_feature 1..23: note = Synthetic construct
  source 1..23: mol_type = other DNA
gatgacccacttcgcttgtaggc

SEQ ID NO: 14177 - DNA, 23 bp, synthetic construct
  misc_feature 1..23: note = Synthetic construct
  source 1..23: mol_type = other DNA
atgacccacttcgcttgtaggca

SEQ ID NO: 14178 - DNA, 23 bp, synthetic construct
  misc_feature 1..23: note = Synthetic construct
  source 1..23: mol_type = other DNA
tgacccacttcgcttgtaggcac

SEQ ID NO: 14179 - DNA, 23 bp, synthetic construct
  misc_feature 1..23: note = Synthetic construct
  source 1..23: mol_type = other DNA
gacccacttcgcttgtaggcacc

SEQ ID NO: 14180 - DNA, 23 bp, synthetic construct
  misc_feature 1..23: note = Synthetic construct
  source 1..23: mol_type = other DNA
acccacttcgcttgtaggcacct

SEQ ID NO: 14181 - DNA, 23 bp, synthetic construct
  misc_feature 1..23: note = Synthetic construct
  source 1..23: mol_type = other DNA
cccacttcgcttgtaggcacctt

SEQ ID NO: 14182 - DNA, 23 bp, synthetic construct
  misc_feature 1..23: note = Synthetic construct
  source 1..23: mol_type = other DNA
ccacttcgcttgtaggcaccttg

SEQ ID NO: 14183 - DNA, 23 bp, synthetic construct
  misc_feature 1..23: note = Synthetic construct
  source 1..23: mol_type = other DNA
cacttcgcttgtaggcaccttga

SEQ ID NO: 14184 - DNA, 23 bp, synthetic construct
  misc_feature 1..23: note = Synthetic construct
  source 1..23: mol_type = other DNA
acttcgcttgtaggcaccttgat

SEQ ID NO: 14185 - DNA, 23 bp, synthetic construct
  misc_feature 1..23: note = Synthetic construct
  source 1..23: mol_type = other DNA
cttcgcttgtaggcaccttgatc

SEQ ID NO: 14186 - DNA, 23 bp, synthetic construct
  misc_feature 1..23: note = Synthetic construct
  source 1..23: mol_type = other DNA
ttcgcttgtaggcaccttgatct

SEQ ID NO: 14187 - DNA, 23 bp, synthetic construct
  misc_feature 1..23: note = Synthetic construct
  source 1..23: mol_type = other DNA
tcgcttgtaggcaccttgatcta

SEQ ID NO: 14188 - DNA, 23 bp, synthetic construct
  misc_feature 1..23: note = Synthetic construct
  source 1..23: mol_type = other DNA
cgcttgtaggcaccttgatctat

SEQ ID NO: 14189 - DNA, 23 bp, synthetic construct
  misc_feature 1..23: note = Synthetic construct
  source 1..23: mol_type = other DNA
gcttgtaggcaccttgatctatc

SEQ ID NO: 14190 - DNA, 23 bp, synthetic construct
  misc_feature 1..23: note = Synthetic construct
  source 1..23: mol_type = other DNA
cttgtaggcaccttgatctatcg

SEQ ID NO: 14191 - DNA, 23 bp, synthetic construct
  misc_feature 1..23: note = Synthetic construct
  source 1..23: mol_type = other DNA
ttgtaggcaccttgatctatcga

SEQ ID NO: 14192 - DNA, 23 bp, synthetic construct
  misc_feature 1..23: note = Synthetic construct
  source 1..23: mol_type = other DNA
tgtaggcaccttgatctatcgat

SEQ ID NO: 14193 - DNA, 23 bp, synthetic construct
  misc_feature 1..23: note = Synthetic construct
  source 1..23: mol_type = other DNA
gtaggcaccttgatctatcgatg

SEQ ID NO: 14194 - DNA, 23 bp, synthetic construct
  misc_feature 1..23: note = Synthetic construct
  source 1..23: mol_type = other DNA
taggcaccttgatctatcgatgt

SEQ ID NO: 14195 - DNA, 23 bp, synthetic construct
  misc_feature 1..23: note = Synthetic construct
  source 1..23: mol_type = other DNA
aggcaccttgatctatcgatgtg

SEQ ID NO: 14196 - DNA, 23 bp, synthetic construct
  misc_feature 1..23: note = Synthetic construct
  source 1..23: mol_type = other DNA
ggcaccttgatctatcgatgtga

SEQ ID NO: 14197 - DNA, 23 bp, synthetic construct
  misc_feature 1..23: note = Synthetic construct
  source 1..23: mol_type = other DNA
gcaccttgatctatcgatgtgac

SEQ ID NO: 14198 - DNA, 23 bp, synthetic construct
  misc_feature 1..23: note = Synthetic construct
  source 1..23: mol_type = other DNA
caccttgatctatcgatgtgaca

SEQ ID NO: 14199 - DNA, 23 bp, synthetic construct
  misc_feature 1..23: note = Synthetic construct
  source 1..23: mol_type = other DNA
accttgatctatcgatgtgacac

SEQ ID NO: 14200 - DNA, 23 bp, synthetic construct
  misc_feature 1..23: note = Synthetic construct
  source 1..23: mol_type = other DNA
ccttgatctatcgatgtgacact

SEQ ID NO: 14201 - DNA, 23 bp, synthetic construct
  misc_feature 1..23: note = Synthetic construct
  source 1..23: mol_type = other DNA
cttgatctatcgatgtgacactt

SEQ ID NO: 14202 - DNA, 23 bp, synthetic construct
  misc_feature 1..23: note = Synthetic construct
  source 1..23: mol_type = other DNA
ttgatctatcgatgtgacactta

SEQ ID NO: 14203 - DNA, 23 bp, synthetic construct
  misc_feature 1..23: note = Synthetic construct
  source 1..23: mol_type = other DNA
tgatctatcgatgtgacacttaa

SEQ ID NO: 14204 - DNA, 23 bp, synthetic construct
  misc_feature 1..23: note = Synthetic construct
  source 1..23: mol_type = other DNA
gatctatcgatgtgacacttaac

SEQ ID NO: 14205 - DNA, 23 bp, synthetic construct
  misc_feature 1..23: note = Synthetic construct
  source 1..23: mol_type = other DNA
atctatcgatgtgacacttaacg

SEQ ID NO: 14206 - DNA, 23 bp, synthetic construct
  misc_feature 1..23: note = Synthetic construct
  source 1..23: mol_type = other DNA
tctatcgatgtgacacttaacgc

SEQ ID NO: 14207 - DNA, 23 bp, synthetic construct
  misc_feature 1..23: note = Synthetic construct
  source 1..23: mol_type = other DNA
ctatcgatgtgacacttaacgcc

SEQ ID NO: 14208 - DNA, 23 bp, synthetic construct
  misc_feature 1..23: note = Synthetic construct
  source 1..23: mol_type = other DNA
tatcgatgtgacacttaacgccc

SEQ ID NO: 14209 - DNA, 23 bp, synthetic construct
  misc_feature 1..23: note = Synthetic construct
  source 1..23: mol_type = other DNA
atcgatgtgacacttaacgcccc

SEQ ID NO: 14210 - DNA, 23 bp, synthetic construct
  misc_feature 1..23: note = Synthetic construct
  source 1..23: mol_type = other DNA
tcgatgtgacacttaacgccccc

SEQ ID NO: 14211 - DNA, 23 bp, synthetic construct
  misc_feature 1..23: note = Synthetic construct
  source 1..23: mol_type = other DNA
cgatgtgacacttaacgcccccc

SEQ ID NO: 14212 - DNA, 23 bp, synthetic construct
  misc_feature 1..23: note = Synthetic construct
  source 1..23: mol_type = other DNA
gatgtgacacttaacgccccccg

SEQ ID NO: 14213 - DNA, 23 bp, synthetic construct
  misc_feature 1..23: note = Synthetic construct
  source 1..23: mol_type = other DNA
atgtgacacttaacgccccccgt

SEQ ID NO: 14214 - DNA, 23 bp, synthetic construct
  misc_feature 1..23: note = Synthetic construct
  source 1..23: mol_type = other DNA
tgtgacacttaacgccccccgtg

SEQ ID NO: 14215 - DNA, 23 bp, synthetic construct
  misc_feature 1..23: note = Synthetic construct
  source 1..23: mol_type = other DNA
gtgacacttaacgccccccgtga

SEQ ID NO: 14216 - DNA, 23 bp, synthetic construct
  misc_feature 1..23: note = Synthetic construct
  source 1..23: mol_type = other DNA
tgacacttaacgccccccgtgaa

SEQ ID NO: 14217 - DNA, 23 bp, synthetic construct
  misc_feature 1..23: note = Synthetic construct
  source 1..23: mol_type = other DNA
gacacttaacgccccccgtgaat

SEQ ID NO: 14218 - DNA, 23 bp, synthetic construct
  misc_feature 1..23: note = Synthetic construct
  source 1..23: mol_type = other DNA
acacttaacgccccccgtgaata

SEQ ID NO: 14219 - DNA, 23 bp, synthetic construct
  misc_feature 1..23: note = Synthetic construct
  source 1..23: mol_type = other DNA
cacttaacgccccccgtgaatac

SEQ ID NO: 14220 - DNA, 23 bp, synthetic construct
  misc_feature 1..23: note = Synthetic construct
  source 1..23: mol_type = other DNA
acttaacgccccccgtgaatacg

SEQ ID NO: 14221 - DNA, 23 bp, synthetic construct
  misc_feature 1..23: note = Synthetic construct
  source 1..23: mol_type = other DNA
cttaacgccccccgtgaatacgg

SEQ ID NO: 14222 - DNA, 23 bp, synthetic construct
  misc_feature 1..23: note = Synthetic construct
  source 1..23: mol_type = other DNA
ttaacgccccccgtgaatacgga

SEQ ID NO: 14223 - DNA, 23 bp, synthetic construct
  misc_feature 1..23: note = Synthetic construct
  source 1..23: mol_type = other DNA
taacgccccccgtgaatacggag

SEQ ID NO: 14224 - DNA, 23 bp, synthetic construct
  misc_feature 1..23: note = Synthetic construct
  source 1..23: mol_type = other DNA
aacgccccccgtgaatacggaga

SEQ ID NO: 14225 - DNA, 23 bp, synthetic construct
  misc_feature 1..23: note = Synthetic construct
  source 1..23: mol_type = other DNA
acgccccccgtgaatacggagag

SEQ ID NO: 14226 - DNA, 23 bp, synthetic construct
  misc_feature 1..23: note = Synthetic construct
  source 1..23: mol_type = other DNA
cgccccccgtgaatacggagagg

SEQ ID NO: 14227 - DNA, 23 bp, synthetic construct
  misc_feature 1..23: note = Synthetic construct
  source 1..23: mol_type = other DNA
gccccccgtgaatacggagaggg

SEQ ID NO: 14228 - DNA, 23 bp, synthetic construct
  misc_feature 1..23: note = Synthetic construct
  source 1..23: mol_type = other DNA
ccccccgtgaatacggagagggg

SEQ ID NO: 14229 - DNA, 23 bp, synthetic construct
  misc_feature 1..23: note = Synthetic construct
  source 1..23: mol_type = other DNA
cccccgtgaatacggagaggggt

SEQ ID NO: 14230 - DNA, 23 bp, synthetic construct
  misc_feature 1..23: note = Synthetic construct
  source 1..23: mol_type = other DNA
ccccgtgaatacggagaggggta

SEQ ID NO: 14231 - DNA, 23 bp, synthetic construct
  misc_feature 1..23: note = Synthetic construct
  source 1..23: mol_type = other DNA
cccgtgaatacggagaggggtag

SEQ ID NO: 14232 - DNA, 23 bp, synthetic construct
  misc_feature 1..23: note = Synthetic construct
  source 1..23: mol_type = other DNA
ccgtgaatacggagaggggtagt

SEQ ID NO: 14233 - DNA, 23 bp, synthetic construct
  misc_feature 1..23: note = Synthetic construct
  source 1..23: mol_type = other DNA
cgtgaatacggagaggggtagtg

SEQ ID NO: 14234 - DNA, 23 bp, synthetic construct
  misc_feature 1..23: note = Synthetic construct
  source 1..23: mol_type = other DNA
gtgaatacggagaggggtagtgc

SEQ ID NO: 14235 - DNA, 23 bp, synthetic construct
  misc_feature 1..23: note = Synthetic construct
  source 1..23: mol_type = other DNA
tgaatacggagaggggtagtgcc

SEQ ID NO: 14236 - DNA, 23 bp, synthetic construct
  misc_feature 1..23: note = Synthetic construct
  source 1..23: mol_type = other DNA
gaatacggagaggggtagtgcca

SEQ ID NO: 14237 - DNA, 23 bp, synthetic construct
  misc_feature 1..23: note = Synthetic construct
  source 1..23: mol_type = other DNA
aatacggagaggggtagtgccac

SEQ ID NO: 14238 - DNA, 23 bp, synthetic construct
  misc_feature 1..23: note = Synthetic construct
  source 1..23: mol_type = other DNA
atacggagaggggtagtgccact

SEQ ID NO: 14239 - DNA, 23 bp, synthetic construct
  misc_feature 1..23: note = Synthetic construct
  source 1..23: mol_type = other DNA
tacggagaggggtagtgccactg

SEQ ID NO: 14240 - DNA, 23 bp, synthetic construct
  misc_feature 1..23: note = Synthetic construct
  source 1..23: mol_type = other DNA
acggagaggggtagtgccactgt

SEQ ID NO: 14241 - DNA, 23 bp, synthetic construct
  misc_feature 1..23: note = Synthetic construct
  source 1..23: mol_type = other DNA
cggagaggggtagtgccactgtt

SEQ ID NO: 14242 - DNA, 23 bp, synthetic construct
  misc_feature 1..23: note = Synthetic construct
  source 1..23: mol_type = other DNA
ggagaggggtagtgccactgttt

SEQ ID NO: 14243 - DNA, 23 bp, synthetic construct
  misc_feature 1..23: note = Synthetic construct
  source 1..23: mol_type = other DNA
gagaggggtagtgccactgtttc

SEQ ID NO: 14244 - DNA, 23 bp, synthetic construct
  misc_feature 1..23: note = Synthetic construct
  source 1..23: mol_type = other DNA
agaggggtagtgccactgtttcg

SEQ ID NO: 14245 - DNA, 23 bp, synthetic construct
  misc_feature 1..23: note = Synthetic construct
  source 1..23: mol_type = other DNA
gaggggtagtgccactgtttcgt

SEQ ID NO: 14246 - DNA, 23 bp, synthetic construct
  misc_feature 1..23: note = Synthetic construct
  source 1..23: mol_type = other DNA
aggggtagtgccactgtttcgtt

SEQ ID NO: 14247 - DNA, 23 bp, synthetic construct
  misc_feature 1..23: note = Synthetic construct
  source 1..23: mol_type = other DNA
ggggtagtgccactgtttcgttt

SEQ ID NO: 14248 - DNA, 23 bp, synthetic construct
  misc_feature 1..23: note = Synthetic construct
  source 1..23: mol_type = other DNA
gggtagtgccactgtttcgtttt

SEQ ID NO: 14249 - DNA, 23 bp, synthetic construct
  misc_feature 1..23: note = Synthetic construct
  source 1..23: mol_type = other DNA
ggtagtgccactgtttcgttttg

SEQ ID NO: 14250 - DNA, 23 bp, synthetic construct
  misc_feature 1..23: note = Synthetic construct
  source 1..23: mol_type = other DNA
gtagtgccactgtttcgttttgg

SEQ ID NO: 14251 - DNA, 23 bp, synthetic construct
  misc_feature 1..23: note = Synthetic construct
  source 1..23: mol_type = other DNA
tagtgccactgtttcgttttggc

SEQ ID NO: 14252 - DNA, 23 bp, synthetic construct
  misc_feature 1..23: note = Synthetic construct
  source 1..23: mol_type = other DNA
agtgccactgtttcgttttggcc

SEQ ID NO: 14253 - DNA, 23 bp, synthetic construct
  misc_feature 1..23: note = Synthetic construct
  source 1..23: mol_type = other DNA
gtgccactgtttcgttttggccc

SEQ ID NO: 14254 - DNA, 23 bp, synthetic construct
  misc_feature 1..23: note = Synthetic construct
  source 1..23: mol_type = other DNA
tgccactgtttcgttttggcccc

SEQ ID NO: 14255 - DNA, 23 bp, synthetic construct
  misc_feature 1..23: note = Synthetic construct
  source 1..23: mol_type = other DNA
gccactgtttcgttttggcccca

SEQ ID NO: 14256 - DNA, 23 bp, synthetic construct
  misc_feature 1..23: note = Synthetic construct
  source 1..23: mol_type = other DNA
ccactgtttcgttttggccccag

SEQ ID NO: 14257 - DNA, 23 bp, synthetic construct
  misc_feature 1..23: note = Synthetic construct
  source 1..23: mol_type = other DNA
cactgtttcgttttggccccagt

SEQ ID NO: 14258 - DNA, 23 bp, synthetic construct
  misc_feature 1..23: note = Synthetic construct
  source 1..23: mol_type = other DNA
actgtttcgttttggccccagtc

SEQ ID NO: 14259 - DNA, 23 bp, synthetic construct
  misc_feature 1..23: note = Synthetic construct
  source 1..23: mol_type = other DNA
ctgtttcgttttggccccagtcg

SEQ ID NO: 14260 - DNA, 23 bp, synthetic construct
  misc_feature 1..23: note = Synthetic construct
  source 1..23: mol_type = other DNA
tgtttcgttttggccccagtcga

SEQ ID NO: 14261 - DNA, 23 bp, synthetic construct
  misc_feature 1..23: note = Synthetic construct
  source 1..23: mol_type = other DNA
gtttcgttttggccccagtcgag

SEQ ID NO: 14262 - DNA, 23 bp, synthetic construct
  misc_feature 1..23: note = Synthetic construct
  source 1..23: mol_type = other DNA
tttcgttttggccccagtcgagt

SEQ ID NO: 14263 - DNA, 23 bp, synthetic construct
  misc_feature 1..23: note = Synthetic construct
  source 1..23: mol_type = other DNA
ttcgttttggccccagtcgagtt

SEQ ID NO: 14264 - DNA, 23 bp, synthetic construct
  misc_feature 1..23: note = Synthetic construct
  source 1..23: mol_type = other DNA
tcgttttggccccagtcgagtta

SEQ ID NO: 14265 - DNA, 23 bp, synthetic construct
  misc_feature 1..23: note = Synthetic construct
  source 1..23: mol_type = other DNA
cgttttggccccagtcgagttaa

SEQ ID NO: 14266 - DNA, 23 bp, synthetic construct
  misc_feature 1..23: note = Synthetic construct
  source 1..23: mol_type = other DNA
gttttggccccagtcgagttaaa

SEQ ID NO: 14267 - DNA, 23 bp, synthetic construct
  misc_feature 1..23: note = Synthetic construct
  source 1..23: mol_type = other DNA
ttttggccccagtcgagttaaaa

SEQ ID NO: 14268 - DNA, 23 bp, synthetic construct
  misc_feature 1..23: note = Synthetic construct
  source 1..23: mol_type = other DNA
tttggccccagtcgagttaaaac

SEQ ID NO: 14269 - DNA, 23 bp, synthetic construct
  misc_feature 1..23: note = Synthetic construct
  source 1..23: mol_type = other DNA
ttggccccagtcgagttaaaacg

SEQ ID NO: 14270 - DNA, 23 bp, synthetic construct
  misc_feature 1..23: note = Synthetic construct
  source 1..23: mol_type = other DNA
tggccccagtcgagttaaaacga

SEQ ID NO: 14271 - DNA, 23 bp, synthetic construct
  misc_feature 1..23: note = Synthetic construct
  source 1..23: mol_type = other DNA
ggccccagtcgagttaaaacgac

SEQ ID NO: 14272 - DNA, 23 bp, synthetic construct
  misc_feature 1..23: note = Synthetic construct
  source 1..23: mol_type = other DNA
gccccagtcgagttaaaacgacc

SEQ ID NO: 14273 - DNA, 23 bp, synthetic construct
  misc_feature 1..23: note = Synthetic construct
  source 1..23: mol_type = other DNA
ccccagtcgagttaaaacgaccg

SEQ ID NO: 14274 - DNA, 23 bp, synthetic construct
  misc_feature 1..23: note = Synthetic construct
  source 1..23: mol_type = other DNA
cccagtcgagttaaaacgaccgg

SEQ ID NO: 14275 - DNA, 23 bp, synthetic construct
  misc_feature 1..23: note = Synthetic construct
  source 1..23: mol_type = other DNA
ccagtcgagttaaaacgaccggg

SEQ ID NO: 14276 - DNA, 23 bp, synthetic construct
  misc_feature 1..23: note = Synthetic construct
  source 1..23: mol_type = other DNA
cagtcgagttaaaacgaccggga

SEQ ID NO: 14277 - DNA, 23 bp, synthetic construct
  misc_feature 1..23: note = Synthetic construct
  source 1..23: mol_type = other DNA
agtcgagttaaaacgaccgggag

SEQ ID NO: 14278 - DNA, 23 bp, synthetic construct
  misc_feature 1..23: note = Synthetic construct
  source 1..23: mol_type = other DNA
gtcgagttaaaacgaccgggagt

SEQ ID NO: 14279 - DNA, 23 bp, synthetic construct
  misc_feature 1..23: note = Synthetic construct
  source 1..23: mol_type = other DNA
tcgagttaaaacgaccgggagtc

SEQ ID NO: 14280 - DNA, 23 bp, synthetic construct
  misc_feature 1..23: note = Synthetic construct
  source 1..23: mol_type = other DNA
cgagttaaaacgaccgggagtcc

SEQ ID NO: 14281 - DNA, 23 bp, synthetic construct
  misc_feature 1..23: note = Synthetic construct
  source 1..23: mol_type = other DNA
gagttaaaacgaccgggagtcca

SEQ ID NO: 14282 - DNA, 23 bp, synthetic construct
  misc_feature 1..23: note = Synthetic construct
  source 1..23: mol_type = other DNA
agttaaaacgaccgggagtccag

SEQ ID NO: 14283 - DNA, 23 bp, synthetic construct
  misc_feature 1..23: note = Synthetic construct
  source 1..23: mol_type = other DNA
gttaaaacgaccgggagtccagt

SEQ ID NO: 14284 - DNA, 23 bp, synthetic construct
  misc_feature 1..23: note = Synthetic construct
  source 1..23: mol_type = other DNA
ttaaaacgaccgggagtccagtt

SEQ ID NO: 14285 - DNA, 23 bp, synthetic construct
  misc_feature 1..23: note = Synthetic construct
  source 1..23: mol_type = other DNA
taaaacgaccgggagtccagttc

SEQ ID NO: 14286 - DNA, 23 bp, synthetic construct
  misc_feature 1..23: note = Synthetic construct
  source 1..23: mol_type = other DNA
aaaacgaccgggagtccagttcg

SEQ ID NO: 14287 - DNA, 23 bp, synthetic construct
  misc_feature 1..23: note = Synthetic construct
  source 1..23: mol_type = other DNA
aaacgaccgggagtccagttcga

SEQ ID NO: 14288 - DNA, 23 bp, synthetic construct
  misc_feature 1..23: note = Synthetic construct
  source 1..23: mol_type = other DNA
aacgaccgggagtccagttcgaa

SEQ ID NO: 14289 - DNA, 23 bp, synthetic construct
  misc_feature 1..23: note = Synthetic construct
  source 1..23: mol_type = other DNA
acgaccgggagtccagttcgaac

SEQ ID NO: 14290 - DNA, 23 bp, synthetic construct
  misc_feature 1..23: note = Synthetic construct
  source 1..23: mol_type = other DNA
cgaccgggagtccagttcgaacg

SEQ ID NO: 14291 - DNA, 23 bp, synthetic construct
  misc_feature 1..23: note = Synthetic construct
  source 1..23: mol_type = other DNA
gaccgggagtccagttcgaacga

SEQ ID NO: 14292 - DNA, 23 bp, synthetic construct
  misc_feature 1..23: note = Synthetic construct
  source 1..23: mol_type = other DNA
accgggagtccagttcgaacgat

SEQ ID NO: 14293 - DNA, 23 bp, synthetic construct
  misc_feature 1..23: note = Synthetic construct
  source 1..23: mol_type = other DNA
ccgggagtccagttcgaacgata

SEQ ID NO: 14294 - DNA, 23 bp, synthetic construct
  misc_feature 1..23: note = Synthetic construct
  source 1..23: mol_type = other DNA
cgggagtccagttcgaacgatat

SEQ ID NO: 14295 - DNA, 23 bp, synthetic construct
  misc_feature 1..23: note = Synthetic construct
  source 1..23: mol_type = other DNA
gggagtccagttcgaacgatatt

SEQ ID NO: 14296 - DNA, 23 bp, synthetic construct
  misc_feature 1..23: note = Synthetic construct
  source 1..23: mol_type = other DNA
ggagtccagttcgaacgatattt

SEQ ID NO: 14297 - DNA, 23 bp, synthetic construct
  misc_feature 1..23: note = Synthetic construct
  source 1..23: mol_type = other DNA
gagtccagttcgaacgatatttt

SEQ ID NO: 14298 - DNA, 23 bp, synthetic construct
  misc_feature 1..23: note = Synthetic construct
  source 1..23: mol_type = other DNA
agtccagttcgaacgatatttta

SEQ ID NO: 14299 - DNA, 23 bp, synthetic construct
  misc_feature 1..23: note = Synthetic construct
  source 1..23: mol_type = other DNA
gtccagttcgaacgatattttaa

SEQ ID NO: 14300 - DNA, 23 bp, synthetic construct
  misc_feature 1..23: note = Synthetic construct
  source 1..23: mol_type = other DNA
tccagttcgaacgatattttaaa

SEQ ID NO: 14301 - DNA, 23 bp, synthetic construct
  misc_feature 1..23: note = Synthetic construct
  source 1..23: mol_type = other DNA
ccagttcgaacgatattttaaag

SEQ ID NO: 14302 - DNA, 23 bp, synthetic construct
  misc_feature 1..23: note = Synthetic construct
  source 1..23: mol_type = other DNA
cagttcgaacgatattttaaaga

SEQ ID NO: 14303 - DNA, 23 bp, synthetic construct
  misc_feature 1..23: note = Synthetic construct
  source 1..23: mol_type = other DNA
agttcgaacgatattttaaagag

SEQ ID NO: 14304 - DNA, 23 bp, synthetic construct
  misc_feature 1..23: note = Synthetic construct
  source 1..23: mol_type = other DNA
gttcgaacgatattttaaagaga

SEQ ID NO: 14305 - DNA, 23 bp, synthetic construct
  misc_feature 1..23: note = Synthetic construct
  source 1..23: mol_type = other DNA
ttcgaacgatattttaaagagaa

SEQ ID NO: 14306 - DNA, 23 bp, synthetic construct
  misc_feature 1..23: note = Synthetic construct
  source 1..23: mol_type = other DNA
tcgaacgatattttaaagagaat

SEQ ID NO: 14307 - DNA, 23 bp, synthetic construct
  misc_feature 1..23: note = Synthetic construct
  source 1..23: mol_type = other DNA
cgaacgatattttaaagagaatg

SEQ ID NO: 14308 - DNA, 23 bp, synthetic construct
  misc_feature 1..23: note = Synthetic construct
  source 1..23: mol_type = other DNA
gaacgatattttaaagagaatga

SEQ ID NO: 14309 - DNA, 23 bp, synthetic construct
  misc_feature 1..23: note = Synthetic construct
  source 1..23: mol_type = other DNA
aacgatattttaaagagaatgag

SEQ ID NO: 14310 - DNA, 23 bp, synthetic construct
  misc_feature 1..23: note = Synthetic construct
  source 1..23: mol_type = other DNA
acgatattttaaagagaatgagt

SEQ ID NO: 14311 - DNA, 23 bp, synthetic construct
  misc_feature 1..23: note = Synthetic construct
  source 1..23: mol_type = other DNA
cgatattttaaagagaatgagtt

SEQ ID NO: 14312 - DNA, 23 bp, synthetic construct
  misc_feature 1..23: note = Synthetic construct
  source 1..23: mol_type = other DNA
gatattttaaagagaatgagtta

SEQ ID NO: 14313 - DNA, 23 bp, synthetic construct
  misc_feature 1..23: note = Synthetic construct
  source 1..23: mol_type = other DNA
atattttaaagagaatgagttat

SEQ ID NO: 14314 - DNA, 23 bp, synthetic construct
  misc_feature 1..23: note = Synthetic construct
  source 1..23: mol_type = other DNA
tattttaaagagaatgagttatc

SEQ ID NO: 14315 - DNA, 23 bp, synthetic construct
  misc_feature 1..23: note = Synthetic construct
  source 1..23: mol_type = other DNA
attttaaagagaatgagttatct

SEQ ID NO: 14316 - DNA, 23 bp, synthetic construct
  misc_feature 1..23: note = Synthetic construct
  source 1..23: mol_type = other DNA
ttttaaagagaatgagttatctt

SEQ ID NO: 14317 - DNA, 23 bp, synthetic construct
  misc_feature 1..23: note = Synthetic construct
  source 1..23: mol_type = other DNA
tttaaagagaatgagttatcttc

SEQ ID NO: 14318 - DNA, 23 bp, synthetic construct
  misc_feature 1..23: note = Synthetic construct
  source 1..23: mol_type = other DNA
ttaaagagaatgagttatcttca

SEQ ID NO: 14319 - DNA, 23 bp, synthetic construct
  misc_feature 1..23: note = Synthetic construct
  source 1..23: mol_type = other DNA
taaagagaatgagttatcttcag

SEQ ID NO: 14320 - DNA, 23 bp, synthetic construct
  misc_feature 1..23: note = Synthetic construct
  source 1..23: mol_type = other DNA
aaagagaatgagttatcttcagt

SEQ ID NO: 14321 - DNA, 23 bp, synthetic construct
  misc_feature 1..23: note = Synthetic construct
  source 1..23: mol_type = other DNA
aagagaatgagttatcttcagtc

SEQ ID NO: 14322 - DNA, 23 bp, synthetic construct
  misc_feature 1..23: note = Synthetic construct
  source 1..23: mol_type = other DNA
agagaatgagttatcttcagtct

SEQ ID NO: 14323 - DNA, 23 bp, synthetic construct
  misc_feature 1..23: note = Synthetic construct
  source 1..23: mol_type = other DNA
gagaatgagttatcttcagtctc

SEQ ID NO: 14324 - DNA, 23 bp, synthetic construct
  misc_feature 1..23: note = Synthetic construct
  source 1..23: mol_type = other DNA
agaatgagttatcttcagtctca

SEQ ID NO: 14325 - DNA, 23 bp, synthetic construct
  misc_feature 1..23: note = Synthetic construct
  source 1..23: mol_type = other DNA
gaatgagttatcttcagtctcac

SEQ ID NO: 14326 - DNA, 23 bp, synthetic construct
  misc_feature 1..23: note = Synthetic construct
  source 1..23: mol_type = other DNA
aatgagttatcttcagtctcacc

SEQ ID NO: 14327 - DNA, 23 bp, synthetic construct
  misc_feature 1..23: note = Synthetic construct
  source 1..23: mol_type = other DNA
atgagttatcttcagtctcaccg

SEQ ID NO: 14328 - DNA, 23 bp, synthetic construct
  misc_feature 1..23: note = Synthetic construct
  source 1..23: mol_type = other DNA
tgagttatcttcagtctcaccgt

SEQ ID NO: 14329 - DNA, 23 bp, synthetic construct
  misc_feature 1..23: note = Synthetic construct
  source 1..23: mol_type = other DNA
gagttatcttcagtctcaccgtc

SEQ ID NO: 14330 - DNA, 23 bp, synthetic construct
  misc_feature 1..23: note = Synthetic construct
  source 1..23: mol_type = other DNA
agttatcttcagtctcaccgtcc

SEQ ID NO: 14331 - DNA, 23 bp, synthetic construct
  misc_feature 1..23: note = Synthetic construct
  source 1..23: mol_type = other DNA
gttatcttcagtctcaccgtccg

SEQ ID NO: 14332 - DNA, 23 bp, synthetic construct
  misc_feature 1..23: note = Synthetic construct
  source 1..23: mol_type = other DNA
ttatcttcagtctcaccgtccgc

SEQ ID NO: 14333 - DNA, 23 bp, synthetic construct
  misc_feature 1..23: note = Synthetic construct
  source 1..23: mol_type = other DNA
tatcttcagtctcaccgtccgcg

SEQ ID NO: 14334 - DNA, 23 bp, synthetic construct
  misc_feature 1..23: note = Synthetic construct
  source 1..23: mol_type = other DNA
atcttcagtctcaccgtccgcgt

SEQ ID NO: 14335 - DNA, 23 bp, synthetic construct
  misc_feature 1..23: note = Synthetic construct
  source 1..23: mol_type = other DNA
tcttcagtctcaccgtccgcgta

SEQ ID NO: 14336 - DNA, 23 bp, synthetic construct
  misc_feature 1..23: note = Synthetic construct
  source 1..23: mol_type = other DNA
cttcagtctcaccgtccgcgtaa

SEQ ID NO: 14337 - DNA, 23 bp, synthetic construct
  misc_feature 1..23: note = Synthetic construct
  source 1..23: mol_type = other DNA
ttcagtctcaccgtccgcgtaaa

SEQ ID NO: 14338 - DNA, 23 bp, synthetic construct
  misc_feature 1..23: note = Synthetic construct
  source 1..23: mol_type = other DNA
tcagtctcaccgtccgcgtaaac

SEQ ID NO: 14339 - DNA, 23 bp, synthetic construct
  misc_feature 1..23: note = Synthetic construct
  source 1..23: mol_type = other DNA
cagtctcaccgtccgcgtaaacg

SEQ ID NO: 14340 - DNA, 23 bp, synthetic construct
  misc_feature 1..23: note = Synthetic construct
  source 1..23: mol_type = other DNA
agtctcaccgtccgcgtaaacgc

SEQ ID NO: 14341 - DNA, 23 bp, synthetic construct
  misc_feature 1..23: note = Synthetic construct
  source 1..23: mol_type = other DNA
gtctcaccgtccgcgtaaacgcg

SEQ ID NO: 14342 - DNA, 23 bp, synthetic construct
  misc_feature 1..23: note = Synthetic construct
  source 1..23: mol_type = other DNA
tctcaccgtccgcgtaaacgcga

SEQ ID NO: 14343 - DNA, 23 bp, synthetic construct
  misc_feature 1..23: note = Synthetic construct
  source 1..23: mol_type = other DNA
ctcaccgtccgcgtaaacgcgaa

SEQ ID NO: 14344 - DNA, 23 bp, synthetic construct
  misc_feature 1..23: note = Synthetic construct
  source 1..23: mol_type = other DNA
tcaccgtccgcgtaaacgcgaac

SEQ ID NO: 14345 - DNA, 23 bp, synthetic construct
  misc_feature 1..23: note = Synthetic construct
  source 1..23: mol_type = other DNA
caccgtccgcgtaaacgcgaacg

SEQ ID NO: 14346 - DNA, 23 bp, synthetic construct
  misc_feature 1..23: note = Synthetic construct
  source 1..23: mol_type = other DNA
accgtccgcgtaaacgcgaacgg

SEQ ID NO: 14347 - DNA, 23 bp, synthetic construct
  misc_feature 1..23: note = Synthetic construct
  source 1..23: mol_type = other DNA
ccgtccgcgtaaacgcgaacgga

SEQ ID NO: 14348 - DNA, 23 bp, synthetic construct
  misc_feature 1..23: note = Synthetic construct
  source 1..23: mol_type = other DNA
cgtccgcgtaaacgcgaacggag

SEQ ID NO: 14349 - DNA, 23 bp, synthetic construct
  misc_feature 1..23: note = Synthetic construct
  source 1..23: mol_type = other DNA
gtccgcgtaaacgcgaacggagg

SEQ ID NO: 14350 - DNA, 23 bp, synthetic construct
  misc_feature 1..23: note = Synthetic construct
  source 1..23: mol_type = other DNA
tccgcgtaaacgcgaacggaggg

SEQ ID NO: 14351 - DNA, 23 bp, synthetic construct
  misc_feature 1..23: note = Synthetic construct
  source 1..23: mol_type = other DNA
ccgcgtaaacgcgaacggagggg

SEQ ID NO: 14352 - DNA, 23 bp, synthetic construct
  misc_feature 1..23: note = Synthetic construct
  source 1..23: mol_type = other DNA
cgcgtaaacgcgaacggagggga

SEQ ID NO: 14353 - DNA, 23 bp, synthetic construct
  misc_feature 1..23: note = Synthetic construct
  source 1..23: mol_type = other DNA
gcgtaaacgcgaacggaggggac

SEQ ID NO: 14354 - DNA, 23 bp, synthetic construct
  misc_feature 1..23: note = Synthetic construct
  source 1..23: mol_type = other DNA
cgtaaacgcgaacggaggggacg

SEQ ID NO: 14355 - DNA, 23 bp, synthetic construct
  misc_feature 1..23: note = Synthetic construct
  source 1..23: mol_type = other DNA
gtaaacgcgaacggaggggacga

SEQ ID NO: 14356 - DNA, 23 bp, synthetic construct
  misc_feature 1..23: note = Synthetic construct
  source 1..23: mol_type = other DNA
taaacgcgaacggaggggacgaa

SEQ ID NO: 14357 - DNA, 23 bp, synthetic construct
  misc_feature 1..23: note = Synthetic construct
  source 1..23: mol_type = other DNA
aaacgcgaacggaggggacgaag

SEQ ID NO: 14358 - DNA, 23 bp, synthetic construct
  misc_feature 1..23: note = Synthetic construct
  source 1..23: mol_type = other DNA
aacgcgaacggaggggacgaagg

SEQ ID NO: 14359 - DNA, 23 bp, synthetic construct
  misc_feature 1..23: note = Synthetic construct
  source 1..23: mol_type = other DNA
acgcgaacggaggggacgaaggt

SEQ ID NO: 14360 - DNA, 23 bp, synthetic construct
  misc_feature 1..23: note = Synthetic construct
  source 1..23: mol_type = other DNA
cgcgaacggaggggacgaaggtc

SEQ ID NO: 14361 - DNA, 23 bp, synthetic construct
  misc_feature 1..23: note = Synthetic construct
  source 1..23: mol_type = other DNA
gcgaacggaggggacgaaggtct

SEQ ID NO: 14362 - DNA, 23 bp, synthetic construct
  misc_feature 1..23: note = Synthetic construct
  source 1..23: mol_type = other DNA
cgaacggaggggacgaaggtctc

SEQ ID NO: 14363 - DNA, 23 bp, synthetic construct
  misc_feature 1..23: note = Synthetic construct
  source 1..23: mol_type = other DNA
gaacggaggggacgaaggtctcg

SEQ ID NO: 14364 - DNA, 23 bp, synthetic construct
  misc_feature 1..23: note = Synthetic construct
  source 1..23: mol_type = other DNA
aacggaggggacgaaggtctcgt

SEQ ID NO: 14365 - DNA, 23 bp, synthetic construct
  misc_feature 1..23: note = Synthetic construct
  source 1..23: mol_type = other DNA
acggaggggacgaaggtctcgtt

SEQ ID NO: 14366 - DNA, 23 bp, synthetic construct
  misc_feature 1..23: note = Synthetic construct
  source 1..23: mol_type = other DNA
cggaggggacgaaggtctcgttc

SEQ ID NO: 14367 - DNA, 23 bp, synthetic construct
  misc_feature 1..23: note = Synthetic construct
  source 1..23: mol_type = other DNA
ggaggggacgaaggtctcgttct

SEQ ID NO: 14368 - DNA, 23 bp, synthetic construct
  misc_feature 1..23: note = Synthetic construct
  source 1..23: mol_type = other DNA
gaggggacgaaggtctcgttctc

SEQ ID NO: 14369 - DNA, 23 bp, synthetic construct
  misc_feature 1..23: note = Synthetic construct
  source 1..23: mol_type = other DNA
aggggacgaaggtctcgttctcc

SEQ ID NO: 14370 - DNA, 23 bp, synthetic construct
  misc_feature 1..23: note = Synthetic construct
  source 1..23: mol_type = other DNA
ggggacgaaggtctcgttctccc

SEQ ID NO: 14371 - DNA, 23 bp, synthetic construct
  misc_feature 1..23: note = Synthetic construct
  source 1..23: mol_type = other DNA
gggacgaaggtctcgttctccct

SEQ ID NO: 14372 - DNA, 23 bp, synthetic construct
  misc_feature 1..23: note = Synthetic construct
  source 1..23: mol_type = other DNA
ggacgaaggtctcgttctcccta

SEQ ID NO: 14373 - DNA, 23 bp, synthetic construct
  misc_feature 1..23: note = Synthetic construct
  source 1..23: mol_type = other DNA
gacgaaggtctcgttctccctat

SEQ ID NO: 14374 - DNA, 23 bp, synthetic construct
  misc_feature 1..23: note = Synthetic construct
  source 1..23: mol_type = other DNA
acgaaggtctcgttctccctatc

SEQ ID NO: 14375 - DNA, 23 bp, synthetic construct
  misc_feature 1..23: note = Synthetic construct
  source 1..23: mol_type = other DNA
cgaaggtctcgttctccctatca

SEQ ID NO: 14376 - DNA, 23 bp, synthetic construct
  misc_feature 1..23: note = Synthetic construct
  source 1..23: mol_type = other DNA
gaaggtctcgttctccctatcaa

SEQ ID NO: 14377 - DNA, 23 bp, synthetic construct
  misc_feature 1..23: note = Synthetic construct
  source 1..23: mol_type = other DNA
aaggtctcgttctccctatcaag

SEQ ID NO: 14378 - DNA, 23 bp, synthetic construct
  misc_feature 1..23: note = Synthetic construct
  source 1..23: mol_type = other DNA
aggtctcgttctccctatcaagg

SEQ ID NO: 14379 - DNA, 23 bp, synthetic construct
  misc_feature 1..23: note = Synthetic construct
  source 1..23: mol_type = other DNA
ggtctcgttctccctatcaaggg

SEQ ID NO: 14380 - DNA, 23 bp, synthetic construct
  misc_feature 1..23: note = Synthetic construct
  source 1..23: mol_type = other DNA
gtctcgttctccctatcaagggt

SEQ ID NO: 14381 - DNA, 23 bp, synthetic construct
  misc_feature 1..23: note = Synthetic construct
  source 1..23: mol_type = other DNA
tctcgttctccctatcaagggta

SEQ ID NO: 14382 - DNA, 23 bp, synthetic construct
  misc_feature 1..23: note = Synthetic construct
  source 1..23: mol_type = other DNA
ctcgttctccctatcaagggtac

SEQ ID NO: 14383 - DNA, 23 bp, synthetic construct
  misc_feature 1..23: note = Synthetic construct
  source 1..23: mol_type = other DNA
tcgttctccctatcaagggtact

SEQ ID NO: 14384 - DNA, 23 bp, synthetic construct
  misc_feature 1..23: note = Synthetic construct
  source 1..23: mol_type = other DNA
cgttctccctatcaagggtacta

SEQ ID NO: 14385 - DNA, 23 bp, synthetic construct
  misc_feature 1..23: note = Synthetic construct
  source 1..23: mol_type = other DNA
gttctccctatcaagggtactaa

SEQ ID NO: 14386 - DNA, 23 bp, synthetic construct
  misc_feature 1..23: note = Synthetic construct
  source 1..23: mol_type = other DNA
ttctccctatcaagggtactaaa

SEQ ID NO: 14387 - DNA, 23 bp, synthetic construct
  misc_feature 1..23: note = Synthetic construct
  source 1..23: mol_type = other DNA
tctccctatcaagggtactaaaa

SEQ ID NO: 14388 - DNA, 23 bp, synthetic construct
  misc_feature 1..23: note = Synthetic construct
  source 1..23: mol_type = other DNA
ctccctatcaagggtactaaaag

SEQ ID NO: 14389 - DNA, 23 bp, synthetic construct
  misc_feature 1..23: note = Synthetic construct
  source 1..23: mol_type = other DNA
tccctatcaagggtactaaaagc

SEQ ID NO: 14390 - DNA, 23 bp, synthetic construct
  misc_feature 1..23: note = Synthetic construct
  source 1..23: mol_type = other DNA
ccctatcaagggtactaaaagct

SEQ ID NO: 14391 - DNA, 23 bp, synthetic construct
  misc_feature 1..23: note = Synthetic construct
  source 1..23: mol_type = other DNA
cctatcaagggtactaaaagctc

SEQ ID NO: 14392 - DNA, 23 bp, synthetic construct
  misc_feature 1..23: note = Synthetic construct
  source 1..23: mol_type = other DNA
ctatcaagggtactaaaagctcg

SEQ ID NO: 14393 - DNA, 23 bp, synthetic construct
  misc_feature 1..23: note = Synthetic construct
  source 1..23: mol_type = other DNA
tatcaagggtactaaaagctcgc

SEQ ID NO: 14394 - DNA, 23 bp, synthetic construct
  misc_feature 1..23: note = Synthetic construct
  source 1..23: mol_type = other DNA
atcaagggtactaaaagctcgca

SEQ ID NO: 14395 - DNA, 23 bp, synthetic construct
  misc_feature 1..23: note = Synthetic construct
  source 1..23: mol_type = other DNA
tcaagggtactaaaagctcgcac

SEQ ID NO: 14396 - DNA, 23 bp, synthetic construct
  misc_feature 1..23: note = Synthetic construct
  source 1..23: mol_type = other DNA
caagggtactaaaagctcgcaca

SEQ ID NO: 14397 - DNA, 23 bp, synthetic construct
  misc_feature 1..23: note = Synthetic construct
  source 1..23: mol_type = other DNA
aagggtactaaaagctcgcacag

SEQ ID NO: 14398 - DNA, 23 bp, synthetic construct
  misc_feature 1..23: note = Synthetic construct
  source 1..23: mol_type = other DNA
agggtactaaaagctcgcacagg

SEQ ID NO: 14399 - DNA, 23 bp, synthetic construct
  misc_feature 1..23: note = Synthetic construct
  source 1..23: mol_type = other DNA
gggtactaaaagctcgcacaggt

SEQ ID NO: 14400 - DNA, 23 bp, synthetic construct
  misc_feature 1..23: note = Synthetic construct
  source 1..23: mol_type = other DNA
ggtactaaaagctcgcacaggtc

SEQ ID NO: 14401 - DNA, 23 bp, synthetic construct
  misc_feature 1..23: note = Synthetic construct
  source 1..23: mol_type = other DNA
gtactaaaagctcgcacaggtca

SEQ ID NO: 14402 - DNA, 23 bp, synthetic construct
  misc_feature 1..23: note = Synthetic construct
  source 1..23: mol_type = other DNA
tactaaaagctcgcacaggtcaa

SEQ ID NO: 14403 - DNA, 23 bp, synthetic construct
  misc_feature 1..23: note = Synthetic construct
  source 1..23: mol_type = other DNA
actaaaagctcgcacaggtcaaa

SEQ ID NO: 14404 - DNA, 23 bp, synthetic construct
  misc_feature 1..23: note = Synthetic construct
  source 1..23: mol_type = other DNA
ctaaaagctcgcacaggtcaaac

SEQ ID NO: 14405 - DNA, 23 bp, synthetic construct
  misc_feature 1..23: note = Synthetic construct
  source 1..23: mol_type = other DNA
taaaagctcgcacaggtcaaacc

SEQ ID NO: 14406 - DNA, 23 bp, synthetic construct
  misc_feature 1..23: note = Synthetic construct
  source 1..23: mol_type = other DNA
aaaagctcgcacaggtcaaacct

SEQ ID NO: 14407 - DNA, 23 bp, synthetic construct
  misc_feature 1..23: note = Synthetic construct
  source 1..23: mol_type = other DNA
aaagctcgcacaggtcaaacctc

SEQ ID NO: 14408 - DNA, 23 bp, synthetic construct
  misc_feature 1..23: note = Synthetic construct
  source 1..23: mol_type = other DNA
aagctcgcacaggtcaaacctcc

SEQ ID NO: 14409 - DNA, 23 bp, synthetic construct
  misc_feature 1..23: note = Synthetic construct
  source 1..23: mol_type = other DNA
agctcgcacaggtcaaacctcct

SEQ ID NO: 14410 - DNA, 23 bp, synthetic construct
  misc_feature 1..23: note = Synthetic construct
  source 1..23: mol_type = other DNA
gctcgcacaggtcaaacctccta

SEQ ID NO: 14411 - DNA, 23 bp, synthetic construct
  misc_feature 1..23: note = Synthetic construct
  source 1..23: mol_type = other DNA
ctcgcacaggtcaaacctcctag

SEQ ID NO: 14412 - DNA, 23 bp, synthetic construct
  misc_feature 1..23: note = Synthetic construct
  source 1..23: mol_type = other DNA
tcgcacaggtcaaacctcctagg

SEQ ID NO: 14413 - DNA, 23 bp, synthetic construct
  misc_feature 1..23: note = Synthetic construct
  source 1..23: mol_type = other DNA
cgcacaggtcaaacctcctagga

SEQ ID NO: 14414 - DNA, 23 bp, synthetic construct
  misc_feature 1..23: note = Synthetic construct
  source 1..23: mol_type = other DNA
gcacaggtcaaacctcctaggaa

SEQ ID NO: 14415 - DNA, 23 bp, synthetic construct
  misc_feature 1..23: note = Synthetic construct
  source 1..23: mol_type = other DNA
cacaggtcaaacctcctaggaat

SEQ ID NO: 14416 - DNA, 23 bp, synthetic construct
  misc_feature 1..23: note = Synthetic construct
  source 1..23: mol_type = other DNA
acaggtcaaacctcctaggaatg

SEQ ID NO: 14417 - DNA, 23 bp, synthetic construct
  misc_feature 1..23: note = Synthetic construct
  source 1..23: mol_type = other DNA
caggtcaaacctcctaggaatgg

SEQ ID NO: 14418 - DNA, 23 bp, synthetic construct
  misc_feature 1..23: note = Synthetic construct
  source 1..23: mol_type = other DNA
aggtcaaacctcctaggaatgga

SEQ ID NO: 14419 - DNA, 23 bp, synthetic construct
  misc_feature 1..23: note = Synthetic construct
  source 1..23: mol_type = other DNA
ggtcaaacctcctaggaatggaa

SEQ ID NO: 14420 - DNA, 23 bp, synthetic construct
  misc_feature 1..23: note = Synthetic construct
  source 1..23: mol_type = other DNA
gtcaaacctcctaggaatggaat

SEQ ID NO: 14421 - DNA, 23 bp, synthetic construct
  misc_feature 1..23: note = Synthetic construct
  source 1..23: mol_type = other DNA
tcaaacctcctaggaatggaatt

SEQ ID NO: 14422 - DNA, 23 bp, synthetic construct
  misc_feature 1..23: note = Synthetic construct
  source 1..23: mol_type = other DNA
caaacctcctaggaatggaattc

SEQ ID NO: 14423 - DNA, 23 bp, synthetic construct
  misc_feature 1..23: note = Synthetic construct
  source 1..23: mol_type = other DNA
aaacctcctaggaatggaattcc

SEQ ID NO: 14424 - DNA, 23 bp, synthetic construct
  misc_feature 1..23: note = Synthetic construct
  source 1..23: mol_type = other DNA
aacctcctaggaatggaattccg

SEQ ID NO: 14425 - DNA, 23 bp, synthetic construct
  misc_feature 1..23: note = Synthetic construct
  source 1..23: mol_type = other DNA
acctcctaggaatggaattccgg

SEQ ID NO: 14426 - DNA, 23 bp, synthetic construct
  misc_feature 1..23: note = Synthetic construct
  source 1..23: mol_type = other DNA
cctcctaggaatggaattccggc

SEQ ID NO: 14427 - DNA, 23 bp, synthetic construct
  misc_feature 1..23: note = Synthetic construct
  source 1..23: mol_type = other DNA
ctcctaggaatggaattccggct

SEQ ID NO: 14428 - DNA, 23 bp, synthetic construct
  misc_feature 1..23: note = Synthetic construct
  source 1..23: mol_type = other DNA
tcctaggaatggaattccggcta

SEQ ID NO: 14429 - DNA, 23 bp, synthetic construct
  misc_feature 1..23: note = Synthetic construct
  source 1..23: mol_type = other DNA
cctaggaatggaattccggctac

SEQ ID NO: 14430 - DNA, 23 bp, synthetic construct
  misc_feature 1..23: note = Synthetic construct
  source 1..23: mol_type = other DNA
ctaggaatggaattccggctacc

SEQ ID NO: 14431 - DNA, 23 bp, synthetic construct
  misc_feature 1..23: note = Synthetic construct
  source 1..23: mol_type = other DNA
taggaatggaattccggctacct

SEQ ID NO: 14432 - DNA, 23 bp, synthetic construct
  misc_feature 1..23: note = Synthetic construct
  source 1..23: mol_type = other DNA
aggaatggaattccggctaccta

SEQ ID NO: 14433 - DNA, 23 bp, synthetic construct
  misc_feature 1..23: note = Synthetic construct
  source 1..23: mol_type = other DNA
ggaatggaattccggctacctac

SEQ ID NO: 14434 - DNA, 23 bp, synthetic construct
  misc_feature 1..23: note = Synthetic construct
  source 1..23: mol_type = other DNA
gaatggaattccggctacctaca

SEQ ID NO: 14435 - DNA, 23 bp, synthetic construct
  misc_feature 1..23: note = Synthetic construct
  source 1..23: mol_type = other DNA
aatggaattccggctacctacag

SEQ ID NO: 14436 - DNA, 23 bp, synthetic construct
  misc_feature 1..23: note = Synthetic construct
  source 1..23: mol_type = other DNA
atggaattccggctacctacagc

SEQ ID NO: 14437 - DNA, 23 bp, synthetic construct
  misc_feature 1..23: note = Synthetic construct
  source 1..23: mol_type = other DNA
tggaattccggctacctacagcg

SEQ ID NO: 14438 - DNA, 23 bp, synthetic construct
  misc_feature 1..23: note = Synthetic construct
  source 1..23: mol_type = other DNA
ggaattccggctacctacagcga

SEQ ID NO: 14439 - DNA, 23 bp, synthetic construct
  misc_feature 1..23: note = Synthetic construct
  source 1..23: mol_type = other DNA
gaattccggctacctacagcgat

SEQ ID NO: 14440 - DNA, 23 bp, synthetic construct
  misc_feature 1..23: note = Synthetic construct
  source 1..23: mol_type = other DNA
aattccggctacctacagcgata

SEQ ID NO: 14441 - DNA, 23 bp, synthetic construct
  misc_feature 1..23: note = Synthetic construct
  source 1..23: mol_type = other DNA
attccggctacctacagcgatag

SEQ ID NO: 14442 - DNA, 23 bp, synthetic construct
  misc_feature 1..23: note = Synthetic construct
  source 1..23: mol_type = other DNA
ttccggctacctacagcgatagc

SEQ ID NO: 14443 - DNA, 23 bp, synthetic construct
  misc_feature 1..23: note = Synthetic construct
  source 1..23: mol_type = other DNA
tccggctacctacagcgatagcc

SEQ ID NO: 14444 - DNA, 23 bp, synthetic construct
  misc_feature 1..23: note = Synthetic construct
  source 1..23: mol_type = other DNA
ccggctacctacagcgatagcca

SEQ ID NO: 14445 - DNA, 23 bp, synthetic construct
  misc_feature 1..23: note = Synthetic construct
  source 1..23: mol_type = other DNA
cggctacctacagcgatagccat

SEQ ID NO: 14446 - DNA, 23 bp, synthetic construct
  misc_feature 1..23: note = Synthetic construct
  source 1..23: mol_type = other DNA
ggctacctacagcgatagccatg

SEQ ID NO: 14447 - DNA, 23 bp, synthetic construct
  misc_feature 1..23: note = Synthetic construct
  source 1..23: mol_type = other DNA
gctacctacagcgatagccatgg

SEQ ID NO: 14448 - DNA, 23 bp, synthetic construct
  misc_feature 1..23: note = Synthetic construct
  source 1..23: mol_type = other DNA
ctacctacagcgatagccatggt

SEQ ID NO: 14449 - DNA, 23 bp, synthetic construct
  misc_feature 1..23: note = Synthetic construct
  source 1..23: mol_type = other DNA
tacctacagcgatagccatggta

SEQ ID NO: 14450 - DNA, 23 bp, synthetic construct
  misc_feature 1..23: note = Synthetic construct
  source 1..23: mol_type = other DNA
acctacagcgatagccatggtag

SEQ ID NO: 14451 - DNA, 23 bp, synthetic construct
  misc_feature 1..23: note = Synthetic construct
  source 1..23: mol_type = other DNA
cctacagcgatagccatggtagc

SEQ ID NO: 14452 - DNA, 23 bp, synthetic construct
  misc_feature 1..23: note = Synthetic construct
  source 1..23: mol_type = other DNA
ctacagcgatagccatggtagcg

SEQ ID NO: 14453 - DNA, 23 bp, synthetic construct
  misc_feature 1..23: note = Synthetic construct
  source 1..23: mol_type = other DNA
tacagcgatagccatggtagcgt

SEQ ID NO: 14454 - DNA, 23 bp, synthetic construct
  misc_feature 1..23: note = Synthetic construct
  source 1..23: mol_type = other DNA
acagcgatagccatggtagcgtc

SEQ ID NO: 14455 - DNA, 23 bp, synthetic construct
  misc_feature 1..23: note = Synthetic construct
  source 1..23: mol_type = other DNA
cagcgatagccatggtagcgtct

SEQ ID NO: 14456 - DNA, 23 bp, synthetic construct
  misc_feature 1..23: note = Synthetic construct
  source 1..23: mol_type = other DNA
agcgatagccatggtagcgtctc

SEQ ID NO: 14457 - DNA, 23 bp, synthetic construct
  misc_feature 1..23: note = Synthetic construct
  source 1..23: mol_type = other DNA
gcgatagccatggtagcgtctcg

SEQ ID NO: 14458 - DNA, 23 bp, synthetic construct
  misc_feature 1..23: note = Synthetic construct
  source 1..23: mol_type = other DNA
cgatagccatggtagcgtctcgc

SEQ ID NO: 14459 - DNA, 23 bp, synthetic construct
  misc_feature 1..23: note = Synthetic construct
  source 1..23: mol_type = other DNA
gatagccatggtagcgtctcgct

SEQ ID NO: 14460 - DNA, 23 bp, synthetic construct
  misc_feature 1..23: note = Synthetic construct
  source 1..23: mol_type = other DNA
atagccatggtagcgtctcgcta

SEQ ID NO: 14461 - DNA, 23 bp, synthetic construct
  misc_feature 1..23: note = Synthetic construct
  source 1..23: mol_type = other DNA
tagccatggtagcgtctcgctaa

SEQ ID NO: 14462 - DNA, 23 bp, synthetic construct
  misc_feature 1..23: note = Synthetic construct
  source 1..23: mol_type = other DNA
agccatggtagcgtctcgctaaa

SEQ ID NO: 14463 - DNA, 23 bp, synthetic construct
  misc_feature 1..23: note = Synthetic construct
  source 1..23: mol_type = other DNA
gccatggtagcgtctcgctaaag

SEQ ID NO: 14464 - DNA, 23 bp, synthetic construct
  misc_feature 1..23: note = Synthetic construct
  source 1..23: mol_type = other DNA
ccatggtagcgtctcgctaaaga

SEQ ID NO: 14465 - DNA, 23 bp, synthetic construct
  misc_feature 1..23: note = Synthetic construct
  source 1..23: mol_type = other DNA
catggtagcgtctcgctaaagac

SEQ ID NO: 14466 - DNA, 23 bp, synthetic construct
  misc_feature 1..23: note = Synthetic construct
  source 1..23: mol_type = other DNA
atggtagcgtctcgctaaagaca

SEQ ID NO: 14467 - DNA, 23 bp, synthetic construct
  misc_feature 1..23: note = Synthetic construct
  source 1..23: mol_type = other DNA
tggtagcgtctcgctaaagacat

SEQ ID NO: 14468 - DNA, 23 bp, synthetic construct
  misc_feature 1..23: note = Synthetic construct
  source 1..23: mol_type = other DNA
ggtagcgtctcgctaaagacatt

SEQ ID NO: 14469 - DNA, 23 bp, synthetic construct
  misc_feature 1..23: note = Synthetic construct
  source 1..23: mol_type = other DNA
gtagcgtctcgctaaagacatta

SEQ ID NO: 14470 - DNA, 23 bp, synthetic construct
  misc_feature 1..23: note = Synthetic construct
  source 1..23: mol_type = other DNA
tagcgtctcgctaaagacattaa

SEQ ID NO: 14471 - DNA, 23 bp, synthetic construct
  misc_feature 1..23: note = Synthetic construct
  source 1..23: mol_type = other DNA
agcgtctcgctaaagacattaaa

SEQ ID NO: 14472 - DNA, 23 bp, synthetic construct
  misc_feature 1..23: note = Synthetic construct
  source 1..23: mol_type = other DNA
gcgtctcgctaaagacattaaaa

SEQ ID NO: 14473 - DNA, 23 bp, synthetic construct
  misc_feature 1..23: note = Synthetic construct
  source 1..23: mol_type = other DNA
cgtctcgctaaagacattaaaaa

SEQ ID NO: 14474 - DNA, 23 bp, synthetic construct
  misc_feature 1..23: note = Synthetic construct
  source 1..23: mol_type = other DNA
gtctcgctaaagacattaaaaat

SEQ ID NO: 14475 - DNA, 23 bp, synthetic construct
  misc_feature 1..23: note = Synthetic construct
  source 1..23: mol_type = other DNA
tctcgctaaagacattaaaaatg

SEQ ID NO: 14476 - DNA, 23 bp, synthetic construct
  misc_feature 1..23: note = Synthetic construct
  source 1..23: mol_type = other DNA
ctcgctaaagacattaaaaatgg

SEQ ID NO: 14477 - DNA, 23 bp, synthetic construct
  misc_feature 1..23: note = Synthetic construct
  source 1..23: mol_type = other DNA
tcgctaaagacattaaaaatggc

SEQ ID NO: 14478 - DNA, 23 bp, synthetic construct
  misc_feature 1..23: note = Synthetic construct
  source 1..23: mol_type = other DNA
cgctaaagacattaaaaatggca

SEQ ID NO: 14479 - DNA, 23 bp, synthetic construct
  misc_feature 1..23: note = Synthetic construct
  source 1..23: mol_type = other DNA
gctaaagacattaaaaatggcat

SEQ ID NO: 14480 - DNA, 23 bp, synthetic construct
  misc_feature 1..23: note = Synthetic construct
  source 1..23: mol_type = other DNA
ctaaagacattaaaaatggcatt

SEQ ID NO: 14481 - DNA, 23 bp, synthetic construct
  misc_feature 1..23: note = Synthetic construct
  source 1..23: mol_type = other DNA
taaagacattaaaaatggcatta

SEQ ID NO: 14482 - DNA, 23 bp, synthetic construct
  misc_feature 1..23: note = Synthetic construct
  source 1..23: mol_type = other DNA
aaagacattaaaaatggcattag

SEQ ID NO: 14483 - DNA, 23 bp, synthetic construct
  misc_feature 1..23: note = Synthetic construct
  source 1..23: mol_type = other DNA
aagacattaaaaatggcattagc

SEQ ID NO: 14484 - DNA, 23 bp, synthetic construct
  misc_feature 1..23: note = Synthetic construct
  source 1..23: mol_type = other DNA
agacattaaaaatggcattagct

SEQ ID NO: 14485 - DNA, 23 bp, synthetic construct
  misc_feature 1..23: note = Synthetic construct
  source 1..23: mol_type = other DNA
gacattaaaaatggcattagctc

SEQ ID NO: 14486 - DNA, 23 bp, synthetic construct
  misc_feature 1..23: note = Synthetic construct
  source 1..23: mol_type = other DNA
acattaaaaatggcattagctcg

SEQ ID NO: 14487 - DNA, 23 bp, synthetic construct
  misc_feature 1..23: note = Synthetic construct
  source 1..23: mol_type = other DNA
cattaaaaatggcattagctcga

SEQ ID NO: 14488 - DNA, 23 bp, synthetic construct
  misc_feature 1..23: note = Synthetic construct
  source 1..23: mol_type = other DNA
attaaaaatggcattagctcgac

SEQ ID NO: 14489 - DNA, 23 bp, synthetic construct
  misc_feature 1..23: note = Synthetic construct
  source 1..23: mol_type = other DNA
ttaaaaatggcattagctcgaca

SEQ ID NO: 14490 - DNA, 23 bp, synthetic construct
  misc_feature 1..23: note = Synthetic construct
  source 1..23: mol_type = other DNA
taaaaatggcattagctcgacag

SEQ ID NO: 14491 - DNA, 23 bp, synthetic construct
  misc_feature 1..23: note = Synthetic construct
  source 1..23: mol_type = other DNA
aaaaatggcattagctcgacagg

SEQ ID NO: 14492 - DNA, 23 bp, synthetic construct
  misc_feature 1..23: note = Synthetic construct
  source 1..23: mol_type = other DNA
aaaatggcattagctcgacagga

SEQ ID NO: 14493 - DNA, 23 bp, synthetic construct
  misc_feature 1..23: note = Synthetic construct
  source 1..23: mol_type = other DNA
aaatggcattagctcgacaggaa

SEQ ID NO: 14494 - DNA, 23 bp, synthetic construct
  misc_feature 1..23: note = Synthetic construct
  source 1..23: mol_type = other DNA
aatggcattagctcgacaggaag

SEQ ID NO: 14495 - DNA, 23 bp, synthetic construct
  misc_feature 1..23: note = Synthetic construct
  source 1..23: mol_type = other DNA
atggcattagctcgacaggaagt

SEQ ID NO: 14496 - DNA, 23 bp, synthetic construct
  misc_feature 1..23: note = Synthetic construct
  source 1..23: mol_type = other DNA
tggcattagctcgacaggaagtt

SEQ ID NO: 14497 - DNA, 23 bp, synthetic construct
  misc_feature 1..23: note = Synthetic construct
  source 1..23: mol_type = other DNA
ggcattagctcgacaggaagttg

SEQ ID NO: 14498 - DNA, 23 bp, synthetic construct
  misc_feature 1..23: note = Synthetic construct
  source 1..23: mol_type = other DNA
gcattagctcgacaggaagttga

SEQ ID NO: 14499 - DNA, 23 bp, synthetic construct
  misc_feature 1..23: note = Synthetic construct
  source 1..23: mol_type = other DNA
cattagctcgacaggaagttgag

SEQ ID NO: 14500 - DNA, 23 bp, synthetic construct
  misc_feature 1..23: note = Synthetic construct
  source 1..23: mol_type = other DNA
attagctcgacaggaagttgagc

SEQ ID NO: 14501 - DNA, 23 bp, synthetic construct
  misc_feature 1..23: note = Synthetic construct
  source 1..23: mol_type = other DNA
ttagctcgacaggaagttgagca

SEQ ID NO: 14502 - DNA, 23 bp, synthetic construct
  misc_feature 1..23: note = Synthetic construct
  source 1..23: mol_type = other DNA
tagctcgacaggaagttgagcag

SEQ ID NO: 14503 - DNA, 23 bp, synthetic construct
  misc_feature 1..23: note = Synthetic construct
  source 1..23: mol_type = other DNA
agctcgacaggaagttgagcagg

SEQ ID NO: 14504 - DNA, 23 bp, synthetic construct
  misc_feature 1..23: note = Synthetic construct
  source 1..23: mol_type = other DNA
gctcgacaggaagttgagcagga

SEQ ID NO: 14505 - DNA, 23 bp, synthetic construct
  misc_feature 1..23: note = Synthetic construct
  source 1..23: mol_type = other DNA
ctcgacaggaagttgagcaggac

SEQ ID NO: 14506 - DNA, 23 bp, synthetic construct
  misc_feature 1..23: note = Synthetic construct
  source 1..23: mol_type = other DNA
tcgacaggaagttgagcaggacc

SEQ ID NO: 14507 - DNA, 23 bp, synthetic construct
  misc_feature 1..23: note = Synthetic construct
  source 1..23: mol_type = other DNA
cgacaggaagttgagcaggaccc

SEQ ID NO: 14508 - DNA, 23 bp, synthetic construct
  misc_feature 1..23: note = Synthetic construct
  source 1..23: mol_type = other DNA
gacaggaagttgagcaggacccc

SEQ ID NO: 14509 - DNA, 23 bp, synthetic construct
  misc_feature 1..23: note = Synthetic construct
  source 1..23: mol_type = other DNA
acaggaagttgagcaggaccccg

SEQ ID NO: 14510 - DNA, 23 bp, synthetic construct
  misc_feature 1..23: note = Synthetic construct
  source 1..23: mol_type = other DNA
caggaagttgagcaggaccccga

SEQ ID NO: 14511 - DNA, 23 bp, synthetic construct
  misc_feature 1..23: note = Synthetic construct
  source 1..23: mol_type = other DNA
aggaagttgagcaggaccccgaa

SEQ ID NO: 14512 - DNA, 23 bp, synthetic construct
  misc_feature 1..23: note = Synthetic construct
  source 1..23: mol_type = other DNA
ggaagttgagcaggaccccgaaa

SEQ ID NO: 14513 - DNA, 23 bp, synthetic construct
  misc_feature 1..23: note = Synthetic construct
  source 1..23: mol_type = other DNA
gaagttgagcaggaccccgaaag

SEQ ID NO: 14514 - DNA, 23 bp, synthetic construct
  misc_feature 1..23: note = Synthetic construct
  source 1..23: mol_type = other DNA
aagttgagcaggaccccgaaagg

SEQ ID NO: 14515 - DNA, 23 bp, synthetic construct
  misc_feature 1..23: note = Synthetic construct
  source 1..23: mol_type = other DNA
agttgagcaggaccccgaaaggg

SEQ ID NO: 14516 - DNA, 23 bp, synthetic construct
  misc_feature 1..23: note = Synthetic construct
  source 1..23: mol_type = other DNA
gttgagcaggaccccgaaagggg

SEQ ID NO: 14517 - DNA, 23 bp, synthetic construct
  misc_feature 1..23: note = Synthetic construct
  source 1..23: mol_type = other DNA
ttgagcaggaccccgaaaggggt

SEQ ID NO: 14518 - DNA, 23 bp, synthetic construct
  misc_feature 1..23: note = Synthetic construct
  source 1..23: mol_type = other DNA
tgagcaggaccccgaaaggggtc

SEQ ID NO: 14519 - DNA, 23 bp, synthetic construct
  misc_feature 1..23: note = Synthetic construct
  source 1..23: mol_type = other DNA
gagcaggaccccgaaaggggtcc

SEQ ID NO: 14520 - DNA, 23 bp, synthetic construct
  misc_feature 1..23: note = Synthetic construct
  source 1..23: mol_type = other DNA
agcaggaccccgaaaggggtccc

SEQ ID NO: 14521 - DNA, 23 bp, synthetic construct
  misc_feature 1..23: note = Synthetic construct
  source 1..23: mol_type = other DNA
gcaggaccccgaaaggggtccca

SEQ ID NO: 14522 - DNA, 23 bp, synthetic construct
  misc_feature 1..23: note = Synthetic construct
  source 1..23: mol_type = other DNA
caggaccccgaaaggggtcccac

SEQ ID NO: 14523 - DNA, 23 bp, synthetic construct
  misc_feature 1..23: note = Synthetic construct
  source 1..23: mol_type = other DNA
aggaccccgaaaggggtcccacc

SEQ ID NO: 14524 - DNA, 20 bp, synthetic construct
  misc_feature 1..20: note = Synthetic construct
  source 1..20: mol_type = other DNA
tggtttcacgagccaggggc

SEQ ID NO: 14525 - DNA, 20 bp, synthetic construct
  misc_feature 1..20: note = Synthetic construct
  source 1..20: mol_type = other DNA
tgaagggactaggagattca

SEQ ID NO: 14526 - DNA, 23 bp, synthetic construct
  misc_feature 1..23: note = Synthetic construct
  source 1..23: mol_type = other DNA
tgtgctgcaggcttttgccgagg

SEQ ID NO: 14527 - DNA, 20 bp, synthetic construct
  misc_feature 1..20: note = Synthetic construct
  source 1..20: mol_type = other DNA
accgcgccacttcatgcaga

SEQ ID NO: 14528 - DNA, 21 bp, synthetic construct
  misc_feature 1..21: note = Synthetic construct
  source 1..21: mol_type = other DNA
acgcccaagcatgtcacgcgg

SEQ ID NO: 14529 - DNA, 23 bp, synthetic construct
  misc_feature 1..23: note = Synthetic construct
  source 1..23: mol_type = other DNA
accgccagagaggtactggagtg

SEQ ID NO: 14530 - DNA, 23 bp, synthetic construct
  misc_feature 1..23: note = Synthetic construct
  source 1..23: mol_type = other DNA
aggattcacgtgaacgtaagtca

SEQ ID NO: 14531 - DNA, 22 bp, synthetic construct
  misc_feature 1..22: note = Synthetic construct
  source 1..22: mol_type = other DNA
agccgttaatgagcatggctag

SEQ ID NO: 14532 - DNA, 22 bp, synthetic construct
  misc_feature 1..22: note = Synthetic construct
  source 1..22: mol_type = other DNA
gacagcgctatggaggtaacgg

SEQ ID NO: 14533 - DNA, 23 bp, synthetic construct
  misc_feature 1..23: note = Synthetic construct
  source 1..23: mol_type = other DNA
agggaggtcttcagatcttcgta

SEQ ID NO: 14534 - DNA, 22 bp, synthetic construct
  misc_feature 1..22: note = Synthetic construct
  source 1..22: mol_type = other DNA
cacggaatatgtcatattaagt

SEQ ID NO: 14535 - DNA, 23 bp, synthetic construct
  misc_feature 1..23: note = Synthetic construct
  source 1..23: mol_type = other DNA
gagttgcgcttggaactcatgct

SEQ ID NO: 14536 - DNA, 23 bp, synthetic construct
  misc_feature 1..23: note = Synthetic construct
  source 1..23: mol_type = other DNA
tggatcaagtgatacgcggcctt

SEQ ID NO: 14537 - DNA, 23 bp, synthetic construct
  misc_feature 1..23: note = Synthetic construct
  source 1..23: mol_type = other DNA
ggcgaactgtattctacccttgg

SEQ ID NO: 14538 - DNA, 21 bp, synthetic construct
  misc_feature 1..21: note = Synthetic construct
  source 1..21: mol_type = other DNA
ggaccgcgggctgaacacgcc

SEQ ID NO: 14539 - DNA, 23 bp, synthetic construct
  misc_feature 1..23: note = Synthetic construct
  source 1..23: mol_type = other DNA
attgacaagccaacactacatgg

SEQ ID NO: 14540 - DNA, 20 bp, synthetic construct
  misc_feature 1..20: note = Synthetic construct
  source 1..20: mol_type = other DNA
taggaagaacaccacggttg

SEQ ID NO: 14541 - DNA, 20 bp, synthetic construct
  misc_feature 1..20: note = Synthetic construct
  source 1..20: mol_type = other DNA
agaaaggccgcttcaatttt

SEQ ID NO: 14542 - DNA, 22 bp, synthetic construct
  misc_feature 1..22: note = Synthetic construct
  source 1..22: mol_type = other DNA
ttctgtctgcaccatcgtccgg

SEQ ID NO: 14543 - DNA, 22 bp, synthetic construct
  misc_feature 1..22: note = Synthetic construct
  source 1..22: mol_type = other DNA
tacggaccggtctcagggaatt

SEQ ID NO: 14544 - DNA, 23 bp, synthetic construct
  misc_feature 1..23: note = Synthetic construct
  source 1..23: mol_type = other DNA
atcacggcttccgtcacgcgcgc

SEQ ID NO: 14545 - DNA, 20 bp, synthetic construct
  misc_feature 1..20: note = Synthetic construct
  source 1..20: mol_type = other DNA
gaccatactcctaggtataa

SEQ ID NO: 14546 - DNA, 20 bp, synthetic construct
  misc_feature 1..20: note = Synthetic construct
  source 1..20: mol_type = other DNA
taccgtgaccttgactccta

SEQ ID NO: 14547 - DNA, 22 bp, synthetic construct
  misc_feature 1..22: note = Synthetic construct
  source 1..22: mol_type = other DNA
ccgctctgcgccgagaggacaa

SEQ ID NO: 14548 - DNA, 22 bp, synthetic construct
  misc_feature 1..22: note = Synthetic construct
  source 1..22: mol_type = other DNA
atctcaagcatttgaatggtct

SEQ ID NO: 14549 - DNA, 23 bp, synthetic construct
  misc_feature 1..23: note = Synthetic construct
  source 1..23: mol_type = other DNA
tatattaggccgcaataacgatg

SEQ ID NO: 14550 - DNA, 23 bp, synthetic construct
  misc_feature 1..23: note = Synthetic construct
  source 1..23: mol_type = other DNA
cggtttcatcaccgtctaacgtc

SEQ ID NO: 14551 - DNA, 23 bp, synthetic construct
  misc_feature 1..23: note = Synthetic construct
  source 1..23: mol_type = other DNA
tagggaccagccccccaagagat

SEQ ID NO: 14552 - DNA, 20 bp, synthetic construct
  misc_feature 1..20: note = Synthetic construct
  source 1..20: mol_type = other DNA
tgaactggctcctaaaaccc

SEQ ID NO: 14553 - DNA, 21 bp, synthetic construct
  misc_feature 1..21: note = Synthetic construct
  source 1..21: mol_type = other DNA
acagctcgcaccctcgcattc

SEQ ID NO: 14554 - DNA, 23 bp, synthetic construct
  misc_feature 1..23: note = Synthetic construct
  source 1..23: mol_type = other DNA
cctcgttagccgccacggtcggg

SEQ ID NO: 14555 - DNA, 22 bp, synthetic construct
  misc_feature 1..22: note = Synthetic construct
  source 1..22: mol_type = other DNA
cagccgtgggctggagggtagg

SEQ ID NO: 14556 - DNA, 20 bp, synthetic construct
  misc_feature 1..20: note = Synthetic construct
  source 1..20: mol_type = other DNA
gccacgctgtcttatatgct

SEQ ID NO: 14557 - DNA, 22 bp, synthetic construct
  misc_feature 1..22: note = Synthetic construct
  source 1..22: mol_type = other DNA
ctgcaatgcactcaccaggtga

SEQ ID NO: 14558 - DNA, 21 bp, synthetic construct
  misc_feature 1..21: note = Synthetic construct
  source 1..21: mol_type = other DNA
ctacgggctgaagcccagggc

SEQ ID NO: 14559 - DNA, 22 bp, synthetic construct
  misc_feature 1..22: note = Synthetic construct
  source 1..22: mol_type = other DNA
tttaatgctcgcgatattaacg

SEQ ID NO: 14560 - DNA, 22 bp, synthetic construct
  misc_feature 1..22: note = Synthetic construct
  source 1..22: mol_type = other DNA
ttctgaaatcccacgtagaatg

SEQ ID NO: 14561 - DNA, 23 bp, synthetic construct
  misc_feature 1..23: note = Synthetic construct
  source 1..23: mol_type = other DNA
gtggatcgaactacggtctctgc

SEQ ID NO: 14562 - DNA, 20 bp, synthetic construct
  misc_feature 1..20: note = Synthetic construct
  source 1..20: mol_type = other DNA
tgagggagcagagagaaaca

SEQ ID NO: 14563 - DNA, 20 bp, synthetic construct
  misc_feature 1..20: note = Synthetic construct
  source 1..20: mol_type = other DNA
ccggacggtttctcttcggg

SEQ ID NO: 14564 - DNA, 20 bp, synthetic construct
  misc_feature 1..20: note = Synthetic construct
  source 1..20: mol_type = other DNA
tctcatacaggacagcctcg

SEQ ID NO: 14565 - DNA, 21 bp, synthetic construct
  misc_feature 1..21: note = Synthetic construct
  source 1..21: mol_type = other DNA
gcattgagctcacttcaaatt

SEQ ID NO: 14566 - DNA, 21 bp, synthetic construct
  misc_feature 1..21: note = Synthetic construct
  source 1..21: mol_type = other DNA
caagagattgacgggtcgggt

SEQ ID NO: 14567 - DNA, 22 bp, synthetic construct
  misc_feature 1..22: note = Synthetic construct
  source 1..22: mol_type = other DNA
tttaaatagcctagtgtggaac

SEQ ID NO: 14568 - DNA, 22 bp, synthetic construct
  misc_feature 1..22: note = Synthetic construct
  source 1..22: mol_type = other DNA
ccagccgaaaccttcgtagcag

SEQ ID NO: 14569 - DNA, 23 bp, synthetic construct
  misc_feature 1..23: note = Synthetic construct
  source 1..23: mol_type = other DNA
ggacggaacctcgcagttgagcc

SEQ ID NO: 14570 - DNA, 22 bp, synthetic construct
  misc_feature 1..22: note = Synthetic construct
  source 1..22: mol_type = other DNA
gacggcactaggaagaggctca

SEQ ID NO: 14571 - DNA, 23 bp, synthetic construct
  misc_feature 1..23: note = Synthetic construct
  source 1..23: mol_type = other DNA
tataccgctttcagttttcattt

SEQ ID NO: 14572 - DNA, 23 bp, synthetic construct
  misc_feature 1..23: note = Synthetic construct
  source 1..23: mol_type = other DNA
cggaactaaactcgacgatctac

SEQ ID NO: 14573 - DNA, 21 bp, synthetic construct
  misc_feature 1..21: note = Synthetic construct
  source 1..21: mol_type = other DNA
agaccacgcttcctgccattg

SEQ ID NO: 14574 - DNA, 22 bp, synthetic construct
  misc_feature 1..22: note = Synthetic construct
  source 1..22: mol_type = other DNA
cgctcagtgcttgtaaagttgt

SEQ ID NO: 14575 - DNA, 20 bp, synthetic construct
  misc_feature 1..20: note = Synthetic construct
  source 1..20: mol_type = other DNA
accgcgcactcgggtgtgaa

SEQ ID NO: 14576 - DNA, 22 bp, synthetic construct
  misc_feature 1..22: note = Synthetic construct
  source 1..22: mol_type = other DNA
acgaggatgcatagttctgaag

SEQ ID NO: 14577 - DNA, 23 bp, synthetic construct
  misc_feature 1..23: note = Synthetic construct
  source 1..23: mol_type = other DNA
cgctcacggactctctgtgccac

SEQ ID NO: 14578 - DNA, 22 bp, synthetic construct
  misc_feature 1..22: note = Synthetic construct
  source 1..22: mol_type = other DNA
cttctgtaccggaaccaatcat

SEQ ID NO: 14579 - DNA, 20 bp, synthetic construct
  misc_feature 1..20: note = Synthetic construct
  source 1..20: mol_type = other DNA
aggaattggtataacgtcct

SEQ ID NO: 14580 - DNA, 20 bp, synthetic construct
  misc_feature 1..20: note = Synthetic construct
  source 1..20: mol_type = other DNA
gatacacatacagcgatcat

SEQ ID NO: 14581 - DNA, 22 bp, synthetic construct
  misc_feature 1..22: note = Synthetic construct
  source 1..22: mol_type = other DNA
catcgccatgagtcgaagggct

SEQ ID NO: 14582 - DNA, 23 bp, synthetic construct
  misc_feature 1..23: note = Synthetic construct
  source 1..23: mol_type = other DNA
catccacttgggcagattcctga

SEQ ID NO: 14583 - DNA, 23 bp, synthetic construct
  misc_feature 1..23: note = Synthetic construct
  source 1..23: mol_type = other DNA
tcgtcccccgctagttgagtcag

SEQ ID NO: 14584 - DNA, 22 bp, synthetic construct
  misc_feature 1..22: note = Synthetic construct
  source 1..22: mol_type = other DNA
tatgttgtgtagaccttcgata

SEQ ID NO: 14585 - DNA, 21 bp, synthetic construct
  misc_feature 1..21: note = Synthetic construct
  source 1..21: mol_type = other DNA
ggggggtcagctaccgccctt

SEQ ID NO: 14586 - DNA, 20 bp, synthetic construct
  misc_feature 1..20: note = Synthetic construct
  source 1..20: mol_type = other DNA
cgtatagccgtggtctgcac

SEQ ID NO: 14587 - DNA, 22 bp, synthetic construct
  misc_feature 1..22: note = Synthetic construct
  source 1..22: mol_type = other DNA
ctagaggccgaagatgaggcgg

SEQ ID NO: 14588 - DNA, 21 bp, synthetic construct
  misc_feature 1..21: note = Synthetic construct
  source 1..21: mol_type = other DNA
ccgattagggtagtgcgaaac

SEQ ID NO: 14589 - DNA, 20 bp, synthetic construct
  misc_feature 1..20: note = Synthetic construct
  source 1..20: mol_type = other DNA
cgaacttaccaaaagactct

SEQ ID NO: 14590 - DNA, 21 bp, synthetic construct
  misc_feature 1..21: note = Synthetic construct
  source 1..21: mol_type = other DNA
gatacatgctctcggaggaca

SEQ ID NO: 14591 - DNA, 21 bp, synthetic construct
  misc_feature 1..21: note = Synthetic construct
  source 1..21: mol_type = other DNA
actccaaacgttgaccatgtt

SEQ ID NO: 14592 - DNA, 21 bp, synthetic construct
  misc_feature 1..21: note = Synthetic construct
  source 1..21: mol_type = other DNA
tctttagcctgtagagggcct

SEQ ID NO: 14593 - DNA, 20 bp, synthetic construct
  misc_feature 1..20: note = Synthetic construct
  source 1..20: mol_type = other DNA
gttgtatgtcacgccgatcg

SEQ ID NO: 14594 - DNA, 22 bp, synthetic construct
  misc_feature 1..22: note = Synthetic construct
  source 1..22: mol_type = other DNA
agcccagaattgtgccaacaat

SEQ ID NO: 14595 - DNA, 20 bp, synthetic construct
  misc_feature 1..20: note = Synthetic construct
  source 1..20: mol_type = other DNA
gaccgtctcgccgactacgg

SEQ ID NO: 14596 - DNA, 21 bp, synthetic construct
  misc_feature 1..21: note = Synthetic construct
  source 1..21: mol_type = other DNA
tttaagactgctatcacgggt

SEQ ID NO: 14597 - DNA, 22 bp, synthetic construct
  misc_feature 1..22: note = Synthetic construct
  source 1..22: mol_type = other DNA
aatatggtactgatggtccgat

SEQ ID NO: 14598 - DNA, 22 bp, synthetic construct
  misc_feature 1..22: note = Synthetic construct
  source 1..22: mol_type = other DNA
tagacgaatatggcacgacgta

SEQ ID NO: 14599 - DNA, 20 bp, synthetic construct
  misc_feature 1..20: note = Synthetic construct
  source 1..20: mol_type = other DNA
cccttaatagattaccaggc

SEQ ID NO: 14600 - DNA, 20 bp, synthetic construct
  misc_feature 1..20: note = Synthetic construct
  source 1..20: mol_type = other DNA
ctcataacggggcacgcgag

SEQ ID NO: 14601 - DNA, 20 bp, synthetic construct
  misc_feature 1..20: note = Synthetic construct
  source 1..20: mol_type = other DNA
ttgcgcaccgggggcgagta

SEQ ID NO: 14602 - DNA, 21 bp, synthetic construct
  misc_feature 1..21: note = Synthetic construct
  source 1..21: mol_type = other DNA
gatacttaaacatagcgcttc

SEQ ID NO: 14603 - DNA, 21 bp, synthetic construct
  misc_feature 1..21: note = Synthetic construct
  source 1..21: mol_type = other DNA
atacgcggtgttctgacccgt

SEQ ID NO: 14604 - DNA, 22 bp, synthetic construct
  misc_feature 1..22: note = Synthetic construct
  source 1..22: mol_type = other DNA
tggttggcctcgccactgacct

SEQ ID NO: 14605 - DNA, 23 bp, synthetic construct
  misc_feature 1..23: note = Synthetic construct
  source 1..23: mol_type = other DNA
ccaagacacagacgttattctgt

SEQ ID NO: 14606 - DNA, 21 bp, synthetic construct
  misc_feature 1..21: note = Synthetic construct
  source 1..21: mol_type = other DNA
atcctcagggcaaccatctgg

SEQ ID NO: 14607 - DNA, 20 bp, synthetic construct
  misc_feature 1..20: note = Synthetic construct
  source 1..20: mol_type = other DNA
cgaaacccgtgattttgtgt

SEQ ID NO: 14608 - DNA, 21 bp, synthetic construct
  misc_feature 1..21: note = Synthetic construct
  source 1..21: mol_type = other DNA
ctcgatcacatcggaaggtgt

SEQ ID NO: 14609 - DNA, 20 bp, synthetic construct
  misc_feature 1..20: note = Synthetic construct
  source 1..20: mol_type = other DNA
gagcttccttcagggtaacg

SEQ ID NO: 14610 - DNA, 21 bp, synthetic construct
  misc_feature 1..21: note = Synthetic construct
  source 1..21: mol_type = other DNA
taactgccgccgtagaaacta

SEQ ID NO: 14611 - DNA, 20 bp, synthetic construct
  misc_feature 1..20: note = Synthetic construct
  source 1..20: mol_type = other DNA
tttatgagtactcacaggaa

SEQ ID NO: 14612 - DNA, 22 bp, synthetic construct
  misc_feature 1..22: note = Synthetic construct
  source 1..22: mol_type = other DNA
ctacgggtacatgaagtccata

SEQ ID NO: 14613 - DNA, 20 bp, synthetic construct
  misc_feature 1..20: note = Synthetic construct
  source 1..20: mol_type = other DNA
atcacggcaccgatggctca

SEQ ID NO: 14614 - DNA, 22 bp, synthetic construct
  misc_feature 1..22: note = Synthetic construct
  source 1..22: mol_type = other DNA
gtacgacatatacgcagggtga

SEQ ID NO: 14615 - DNA, 21 bp, synthetic construct
  misc_feature 1..21: note = Synthetic construct
  source 1..21: mol_type = other DNA
ggtgacaacgaggtcgtaaat

SEQ ID NO: 14616 - DNA, 20 bp, synthetic construct
  misc_feature 1..20: note = Synthetic construct
  source 1..20: mol_type = other DNA
gcacctaatgtatggtttat

SEQ ID NO: 14617 - DNA, 21 bp, synthetic construct
  misc_feature 1..21: note = Synthetic construct
  source 1..21: mol_type = other DNA
attcgtagacggaactctgca

SEQ ID NO: 14618 - DNA, 21 bp, synthetic construct
  misc_feature 1..21: note = Synthetic construct
  source 1..21: mol_type = other DNA
gttattcatccctcggaaaaa

SEQ ID NO: 14619 - DNA, 20 bp, synthetic construct
  misc_feature 1..20: note = Synthetic construct
  source 1..20: mol_type = other DNA
ggcttcgtctaaggctagtg

SEQ ID NO: 14620 - DNA, 21 bp, synthetic construct
  misc_feature 1..21: note = Synthetic construct
  source 1..21: mol_type = other DNA
acattgatggagcgttgaaac

SEQ ID NO: 14621 - DNA, 21 bp, synthetic construct
  misc_feature 1..21: note = Synthetic construct
  source 1..21: mol_type = other DNA
gaatgtgttaacggcactctg

SEQ ID NO: 14622 - DNA, 21 bp, synthetic construct
  misc_feature 1..21: note = Synthetic construct
  source 1..21: mol_type = other DNA
cacggaacccctaactaaacc

SEQ ID NO: 14623 - DNA, 20 bp, synthetic construct
  misc_feature 1..20: note = Synthetic construct
  source 1..20: mol_type = other DNA
gtcacggtcagcatcaggca

SEQ ID NO: 14624 - DNA, 21 bp, synthetic construct
  misc_feature 1..21: note = Synthetic construct
  source 1..21: mol_type = other DNA
cgtagcaggccaccctgccgt

SEQ ID NO: 14625 - DNA, 23 bp, synthetic construct
  misc_feature 1..23: note = Synthetic construct
  source 1..23: mol_type = other DNA
gttacgtagcgcagagagggagt

SEQ ID NO: 14626 - DNA, 22 bp, synthetic construct
  misc_feature 1..22: note = Synthetic construct
  source 1..22: mol_type = other DNA
cggccaatcatcctcactgggc

SEQ ID NO: 14627 - DNA, 22 bp, synthetic construct
  misc_feature 1..22: note = Synthetic construct
  source 1..22: mol_type = other DNA
cccacccagtaccccaatagca

SEQ ID NO: 14628 - DNA, 23 bp, synthetic construct
  misc_feature 1..23: note = Synthetic construct
  source 1..23: mol_type = other DNA
agtccagcctcacttacggctgt

SEQ ID NO: 14629 - DNA, 23 bp, synthetic construct
  misc_feature 1..23: note = Synthetic construct
  source 1..23: mol_type = other DNA
gaaacccgttaccgtcttgccct

SEQ ID NO: 14630 - DNA, 21 bp, synthetic construct
  misc_feature 1..21: note = Synthetic construct
  source 1..21: mol_type = other DNA
attgagctcgccggtaccgtc

SEQ ID NO: 14631 - DNA, 23 bp, synthetic construct
  misc_feature 1..23: note = Synthetic construct
  source 1..23: mol_type = other DNA
tcacagacggaagggcgaaaacg

SEQ ID NO: 14632 - DNA, 23 bp, synthetic construct
  misc_feature 1..23: note = Synthetic construct
  source 1..23: mol_type = other DNA
aatatttaagttggtctactggc

SEQ ID NO: 14633 - DNA, 20 bp, synthetic construct
  misc_feature 1..20: note = Synthetic construct
  source 1..20: mol_type = other DNA
tgttcacgtgtgaccgaccc

SEQ ID NO: 14634 - DNA, 20 bp, synthetic construct
  misc_feature 1..20: note = Synthetic construct
  source 1..20: mol_type = other DNA
ccgaactatcgtcggctgga

SEQ ID NO: 14635 - DNA, 23 bp, synthetic construct
  misc_feature 1..23: note = Synthetic construct
  source 1..23: mol_type = other DNA
ctctcgatagccaacggccgaac

SEQ ID NO: 14636 - DNA, 22 bp, synthetic construct
  misc_feature 1..22: note = Synthetic construct
  source 1..22: mol_type = other DNA
gtcaaaacgtcaaaggagatgc

SEQ ID NO: 14637 - DNA, 21 bp, synthetic construct
  misc_feature 1..21: note = Synthetic construct
  source 1..21: mol_type = other DNA
gtcaaccggcgccccgggttt

SEQ ID NO: 14638 - DNA, 20 bp, synthetic construct
  misc_feature 1..20: note = Synthetic construct
  source 1..20: mol_type = other DNA
gcacccgttgcgcggacaga

SEQ ID NO: 14639 - DNA, 22 bp, synthetic construct
  misc_feature 1..22: note = Synthetic construct
  source 1..22: mol_type = other DNA
acaaacgcgtcgtcttagtacc

SEQ ID NO: 14640 - DNA, 20 bp, synthetic construct
  misc_feature 1..20: note = Synthetic construct
  source 1..20: mol_type = other DNA
tcgtactctatgcaactgcc

SEQ ID NO: 14641 - DNA, 21 bp, synthetic construct
  misc_feature 1..21: note = Synthetic construct
  source 1..21: mol_type = other DNA
gacggtctaagagtgcgagag

SEQ ID NO: 14642 - DNA, 23 bp, synthetic construct
  misc_feature 1..23: note = Synthetic construct
  source 1..23: mol_type = other DNA
tctacccattccggcccagtaac

SEQ ID NO: 14643 - DNA, 20 bp, synthetic construct
  misc_feature 1..20: note = Synthetic construct
  source 1..20: mol_type = other DNA
tcgtccgtgtatggctaagg

SEQ ID NO: 14644 - DNA, 23 bp, synthetic construct
  misc_feature 1..23: note = Synthetic construct
  source 1..23: mol_type = other DNA
taactgctagttctatgttgagc

SEQ ID NO: 14645 - DNA, 21 bp, synthetic construct
  misc_feature 1..21: note = Synthetic construct
  source 1..21: mol_type = other DNA
gtgcccgtatagcttcttcga

SEQ ID NO: 14646 - DNA, 20 bp, synthetic construct
  misc_feature 1..20: note = Synthetic construct
  source 1..20: mol_type = other DNA
tcgagcctgccaccgagcgc

SEQ ID NO: 14647 - DNA, 22 bp, synthetic construct
  misc_feature 1..22: note = Synthetic construct
  source 1..22: mol_type = other DNA
ggcaaaagtagtcgacatactt

SEQ ID NO: 14648 - DNA, 20 bp, synthetic construct
  misc_feature 1..20: note = Synthetic construct
  source 1..20: mol_type = other DNA
tgcgcaccggggaaggaggc

SEQ ID NO: 14649 - DNA, 21 bp, synthetic construct
  misc_feature 1..21: note = Synthetic construct
  source 1..21: mol_type = other DNA
ggctgtttacgaaagtatttc

SEQ ID NO: 14650 - DNA, 23 bp, synthetic construct
  misc_feature 1..23: note = Synthetic construct
  source 1..23: mol_type = other DNA
ttcaagatgaaatcaactccctg

SEQ ID NO: 14651 - DNA, 23 bp, synthetic construct
  misc_feature 1..23: note = Synthetic construct
  source 1..23: mol_type = other DNA
tactttcacatctaggggagtcc

SEQ ID NO: 14652 - DNA, 22 bp, synthetic construct
  misc_feature 1..22: note = Synthetic construct
  source 1..22: mol_type = other DNA
cggagctagcagcactttctta

SEQ ID NO: 14653 - DNA, 23 bp, synthetic construct
  misc_feature 1..23: note = Synthetic construct
  source 1..23: mol_type = other DNA
tcggcgacctcggtgcacagctc

SEQ ID NO: 14654 - DNA, 21 bp, synthetic construct
  misc_feature 1..21: note = Synthetic construct
  source 1..21: mol_type = other DNA
tcattaagggattatgccaat

SEQ ID NO: 14655 - DNA, 22 bp, synthetic construct
  misc_feature 1..22: note = Synthetic construct
  source 1..22: mol_type = other DNA
cgctactcagacacgttgtctc

SEQ ID NO: 14656 - DNA, 22 bp, synthetic construct
  misc_feature 1..22: note = Synthetic construct
  source 1..22: mol_type = other DNA
aactacacatatgattttccgg

SEQ ID NO: 14657 - DNA, 20 bp, synthetic construct
  misc_feature 1..20: note = Synthetic construct
  source 1..20: mol_type = other DNA
cgatccataaaggctacgtc

SEQ ID NO: 14658 - DNA, 21 bp, synthetic construct
  misc_feature 1..21: note = Synthetic construct
  source 1..21: mol_type = other DNA
aaggagctcccagggggagca

SEQ ID NO: 14659 - DNA, 22 bp, synthetic construct
  misc_feature 1..22: note = Synthetic construct
  source 1..22: mol_type = other DNA
ttcggtgggactcggaattgat

SEQ ID NO: 14660 - DNA, 22 bp, synthetic construct
  misc_feature 1..22: note = Synthetic construct
  source 1..22: mol_type = other DNA
cgtagcaaactccactgagggg

SEQ ID NO: 14661 - DNA, 20 bp, synthetic construct
  misc_feature 1..20: note = Synthetic construct
  source 1..20: mol_type = other DNA
gacccagccctctgctttgt

SEQ ID NO: 14662 - DNA, 23 bp, synthetic construct
  misc_feature 1..23: note = Synthetic construct
  source 1..23: mol_type = other DNA
caaatgcacgtcggtttgtcgca

SEQ ID NO: 14663 - DNA, 23 bp, synthetic construct
  misc_feature 1..23: note = Synthetic construct
  source 1..23: mol_type = other DNA
gagtctggttgacatttccactg

SEQ ID NO: 14664 - DNA, 23 bp, synthetic construct
  misc_feature 1..23: note = Synthetic construct
  source 1..23: mol_type = other DNA
taattgcacagagctagctcgct

SEQ ID NO: 14665 - DNA, 23 bp, synthetic construct
  misc_feature 1..23: note = Synthetic construct
  source 1..23: mol_type = other DNA
aaaaattactcagatggtctggt

SEQ ID NO: 14666 - DNA, 21 bp, synthetic construct
  misc_feature 1..21: note = Synthetic construct
  source 1..21: mol_type = other DNA
gtcaccccagggattatttat

SEQ ID NO: 14667 - DNA, 23 bp, synthetic construct
  misc_feature 1..23: note = Synthetic construct
  source 1..23: mol_type = other DNA
ggctaatacgaggagaggcagcg

SEQ ID NO: 14668 - DNA, 23 bp, synthetic construct
  misc_feature 1..23: note = Synthetic construct
  source 1..23: mol_type = other DNA
gagcgtacccggactcggccacg

SEQ ID NO: 14669 - DNA, 21 bp, synthetic construct
  misc_feature 1..21: note = Synthetic construct
  source 1..21: mol_type = other DNA
acccattcgcaggtcgctcct

SEQ ID NO: 14670 - DNA, 20 bp, synthetic construct
  misc_feature 1..20: note = Synthetic construct
  source 1..20: mol_type = other DNA
catgtggtaaactgtgcaac

SEQ ID NO: 14671 - DNA, 21 bp, synthetic construct
  misc_feature 1..21: note = Synthetic construct
  source 1..21: mol_type = other DNA
catgcccgcaggccagcccgg

SEQ ID NO: 14672 - DNA, 22 bp, synthetic construct
  misc_feature 1..22: note = Synthetic construct
  source 1..22: mol_type = other DNA
ccgaggaacggaccaccatagg

SEQ ID NO: 14673 - DNA, 22 bp, synthetic construct
  misc_feature 1..22: note = Synthetic construct
  source 1..22: mol_type = other DNA
tagacgagcccaccgcttagac

SEQ ID NO: 14674 - DNA, 20 bp, synthetic construct
  misc_feature 1..20: note = Synthetic construct
  source 1..20: mol_type = other DNA
gagccatgcaagccgctagt

SEQ ID NO: 14675 - DNA, 23 bp, synthetic construct
  misc_feature 1..23: note = Synthetic construct
  source 1..23: mol_type = other DNA
ctcggtaaaagtagttccatcaa

SEQ ID NO: 14676 - DNA, 21 bp, synthetic construct
  misc_feature 1..21: note = Synthetic construct
  source 1..21: mol_type = other DNA
tattggaacaacggcaattcg

SEQ ID NO: 14677 - DNA, 20 bp, synthetic construct
  misc_feature 1..20: note = Synthetic construct
  source 1..20: mol_type = other DNA
gattatcgcttacaatcggc

SEQ ID NO: 14678 - DNA, 21 bp, synthetic construct
  misc_feature 1..21: note = Synthetic construct
  source 1..21: mol_type = other DNA
tagtgcgtggttcgacttagc

SEQ ID NO: 14679 - DNA, 23 bp, synthetic construct
  misc_feature 1..23: note = Synthetic construct
  source 1..23: mol_type = other DNA
gctcgatcgtatcttgtgatcat

SEQ ID NO: 14680 - DNA, 20 bp, synthetic construct
  misc_feature 1..20: note = Synthetic construct
  source 1..20: mol_type = other DNA
ccaggcggcaacactggagc

SEQ ID NO: 14681 - DNA, 22 bp, synthetic construct
  misc_feature 1..22: note = Synthetic construct
  source 1..22: mol_type = other DNA
actggttggagcgaagggagta

SEQ ID NO: 14682 - DNA, 23 bp, synthetic construct
  misc_feature 1..23: note = Synthetic construct
  source 1..23: mol_type = other DNA
ttatactactagatagcgtaggg

SEQ ID NO: 14683 - DNA, 23 bp, synthetic construct
  misc_feature 1..23: note = Synthetic construct
  source 1..23: mol_type = other DNA
gactccgcgaacggggcgtacac

SEQ ID NO: 14684 - DNA, 20 bp, synthetic construct
  misc_feature 1..20: note = Synthetic construct
  source 1..20: mol_type = other DNA
ttaacacgagattcacaggt

SEQ ID NO: 14685 - DNA, 20 bp, synthetic construct
  misc_feature 1..20: note = Synthetic construct
  source 1..20: mol_type = other DNA
ctgtgaatgagctgacctcg

SEQ ID NO: 14686 - DNA, 21 bp, synthetic construct
  misc_feature 1..21: note = Synthetic construct
  source 1..21: mol_type = other DNA
tattaattagcagcaccagac

SEQ ID NO: 14687 - DNA, 22 bp, synthetic construct
  misc_feature 1..22: note = Synthetic construct
  source 1..22: mol_type = other DNA
acactcttcgtattaggtctcc

SEQ ID NO: 14688 - DNA, 23 bp, synthetic construct
  misc_feature 1..23: note = Synthetic construct
  source 1..23: mol_type = other DNA
agttgctttcaagttatattgcg

SEQ ID NO: 14689 - DNA, 20 bp, synthetic construct
  misc_feature 1..20: note = Synthetic construct
  source 1..20: mol_type = other DNA
tttactggactgccggtaac

SEQ ID NO: 14690 - DNA, 22 bp, synthetic construct
  misc_feature 1..22: note = Synthetic construct
  source 1..22: mol_type = other DNA
tccactacgaaatcctatggcg

SEQ ID NO: 14691 - DNA, 21 bp, synthetic construct
  misc_feature 1..21: note = Synthetic construct
  source 1..21: mol_type = other DNA
caggtgcaggatcaagaagtg

SEQ ID NO: 14692 - DNA, 23 bp, synthetic construct
  misc_feature 1..23: note = Synthetic construct
  source 1..23: mol_type = other DNA
ctagcagatcatgctattgtata

SEQ ID NO: 14693 - DNA, 21 bp, synthetic construct
  misc_feature 1..21: note = Synthetic construct
  source 1..21: mol_type = other DNA
ctgtacaacgatctttcgggt

SEQ ID NO: 14694 - DNA, 21 bp, synthetic construct
  misc_feature 1..21: note = Synthetic construct
  source 1..21: mol_type = other DNA
ctaagacgtagcggaatacta

SEQ ID NO: 14695 - DNA, 22 bp, synthetic construct
  misc_feature 1..22: note = Synthetic construct
  source 1..22: mol_type = other DNA
aggtatagcctctactacagat

SEQ ID NO: 14696 - DNA, 20 bp, synthetic construct
  misc_feature 1..20: note = Synthetic construct
  source 1..20: mol_type = other DNA
aggtgaggaaccctaacggc

SEQ ID NO: 14697 - DNA, 20 bp, synthetic construct
  misc_feature 1..20: note = Synthetic construct
  source 1..20: mol_type = other DNA
ccccactggcgcgcagacgg

SEQ ID NO: 14698 - DNA, 22 bp, synthetic construct
  misc_feature 1..22: note = Synthetic construct
  source 1..22: mol_type = other DNA
ggattgttgtgacctagggccc

SEQ ID NO: 14699 - DNA, 23 bp, synthetic construct
  misc_feature 1..23: note = Synthetic construct
  source 1..23: mol_type = other DNA
agtcgcgaacaggggactaaatt

SEQ ID NO: 14700 - DNA, 22 bp, synthetic construct
  misc_feature 1..22: note = Synthetic construct
  source 1..22: mol_type = other DNA
tcctgccatatataatctatct

SEQ ID NO: 14701 - DNA, 20 bp, synthetic construct
  misc_feature 1..20: note = Synthetic construct
  source 1..20: mol_type = other DNA
gaggagctcaagccctaaag

SEQ ID NO: 14702 - DNA, 21 bp, synthetic construct
  misc_feature 1..21: note = Synthetic construct
  source 1..21: mol_type = other DNA
tagatcggttaccaaatgcct

SEQ ID NO: 14703 - DNA, 23 bp, synthetic construct
  misc_feature 1..23: note = Synthetic construct
  source 1..23: mol_type = other DNA
ccatggccgtctaccatacggaa

SEQ ID NO: 14704 - DNA, 22 bp, synthetic construct
  misc_feature 1..22: note = Synthetic construct
  source 1..22: mol_type = other DNA
gtggaagcgagtcctgaggagc

SEQ ID NO: 14705 - DNA, 20 bp, synthetic construct
  misc_feature 1..20: note = Synthetic construct
  source 1..20: mol_type = other DNA
ccgcaagcgccgttagcttc

SEQ ID NO: 14706 - DNA, 22 bp, synthetic construct
  misc_feature 1..22: note = Synthetic construct
  source 1..22: mol_type = other DNA
agagtctcatatgtactttgat

SEQ ID NO: 14707 - DNA, 21 bp, synthetic construct
  misc_feature 1..21: note = Synthetic construct
  source 1..21: mol_type = other DNA
actgtggttctggtaagaccc

SEQ ID NO: 14708 - DNA, 20 bp, synthetic construct
  misc_feature 1..20: note = Synthetic construct
  source 1..20: mol_type = other DNA
aaccggagctcaggcaaaaa

SEQ ID NO: 14709 - DNA, 22 bp, synthetic construct
  misc_feature 1..22: note = Synthetic construct
  source 1..22: mol_type = other DNA
ccggtcgtccaatctagaaggt

SEQ ID NO: 14710 - DNA, 21 bp, synthetic construct
  misc_feature 1..21: note = Synthetic construct
  source 1..21: mol_type = other DNA
gatgtatccccccgccctcca

SEQ ID NO: 14711 - DNA, 23 bp, synthetic construct
  misc_feature 1..23: note = Synthetic construct
  source 1..23: mol_type = other DNA
gtcgtaccctcgccaccgctttt

SEQ ID NO: 14712 - DNA, 22 bp, synthetic construct
  misc_feature 1..22: note = Synthetic construct
  source 1..22: mol_type = other DNA
gtcaggtactcctcactgagga

SEQ ID NO: 14713 - DNA, 21 bp, synthetic construct
  misc_feature 1..21: note = Synthetic construct
  source 1..21: mol_type = other DNA
agagggctgcaataataccgg

SEQ ID NO: 14714 - DNA, 20 bp, synthetic construct
  misc_feature 1..20: note = Synthetic construct
  source 1..20: mol_type = other DNA
cacagctcatcgcagttacg

SEQ ID NO: 14715 - DNA, 23 bp, synthetic construct
  misc_feature 1..23: note = Synthetic construct
  source 1..23: mol_type = other DNA
gtgaacaactagactgatctttc

SEQ ID NO: 14716 - DNA, 21 bp, synthetic construct
  misc_feature 1..21: note = Synthetic construct
  source 1..21: mol_type = other DNA
gagcgcaagggagggacattg

SEQ ID NO: 14717 - DNA, 23 bp, synthetic construct
  misc_feature 1..23: note = Synthetic construct
  source 1..23: mol_type = other DNA
gacgacaacccttttgatcagga

SEQ ID NO: 14718 - DNA, 23 bp, synthetic construct
  misc_feature 1..23: note = Synthetic construct
  source 1..23: mol_type = other DNA
gacataatggctgatatctccat

SEQ ID NO: 14719 - DNA, 23 bp, synthetic construct
  misc_feature 1..23: note = Synthetic construct
  source 1..23: mol_type = other DNA
gccctggggcgacccggtaaatc

SEQ ID NO: 14720 - DNA, 23 bp, synthetic construct
  misc_feature 1..23: note = Synthetic construct
  source 1..23: mol_type = other DNA
caccatagctaacgtcctcagga

SEQ ID NO: 14721 - DNA, 23 bp, synthetic construct
  misc_feature 1..23: note = Synthetic construct
  source 1..23: mol_type = other DNA
gtagcagccatagtagcttcaac

SEQ ID NO: 14722 - DNA, 23 bp, synthetic construct
  misc_feature 1..23: note = Synthetic construct
  source 1..23: mol_type = other DNA
taaagacccaaggctcggcggtg

SEQ ID NO: 14723 - DNA, 21 bp, synthetic construct
  misc_feature 1..21: note = Synthetic construct
  source 1..21: mol_type = other DNA
tgcgaatcctacatttaacgt

SEQ ID NO: 14724 - DNA, 23 bp, synthetic construct
  misc_feature 1..23: note = Synthetic construct
  source 1..23: mol_type = other DNA
gaggattatactcctgaccgcca

SEQ ID NO: 14725 - DNA, 23 bp, synthetic construct
  misc_feature 1..23: note = Synthetic construct
  source 1..23: mol_type = other DNA
cgccagcgtcgcggattcagggt

SEQ ID NO: 14726 - DNA, 22 bp, synthetic construct
  misc_feature 1..22: note = Synthetic construct
  source 1..22: mol_type = other DNA
cgtcggccgaagccacctgctg

SEQ ID NO: 14727 - DNA, 22 bp, synthetic construct
  misc_feature 1..22: note = Synthetic construct
  source 1..22: mol_type = other DNA
gcgtactctttgttgatacaat

SEQ ID NO: 14728 - DNA, 20 bp, synthetic construct
  misc_feature 1..20: note = Synthetic construct
  source 1..20: mol_type = other DNA
ggagccggccctgtgcttga

SEQ ID NO: 14729 - DNA, 20 bp, synthetic construct
  misc_feature 1..20: note = Synthetic construct
  source 1..20: mol_type = other DNA
ctccgtcacctgttcgccta

SEQ ID NO: 14730 - DNA, 20 bp, synthetic construct
  misc_feature 1..20: note = Synthetic construct
  source 1..20: mol_type = other DNA
tctgacctcattcggaggaa

SEQ ID NO: 14731 - DNA, 22 bp, synthetic construct
  misc_feature 1..22: note = Synthetic construct
  source 1..22: mol_type = other DNA
ggggtgccgttcaaaggtggat

SEQ ID NO: 14732 - DNA, 22 bp, synthetic construct
  misc_feature 1..22: note = Synthetic construct
  source 1..22: mol_type = other DNA
tgtcaggcccaagctccaaggt

SEQ ID NO: 14733 - DNA, 21 bp, synthetic construct
  misc_feature 1..21: note = Synthetic construct
  source 1..21: mol_type = other DNA
gatcatggttcaagccggaaa

SEQ ID NO: 14734 - DNA, 23 bp, synthetic construct
  misc_feature 1..23: note = Synthetic construct
  source 1..23: mol_type = other DNA
aagacacgggtatcggcttatgt

SEQ ID NO: 14735 - DNA, 21 bp, synthetic construct
  misc_feature 1..21: note = Synthetic construct
  source 1..21: mol_type = other DNA
cgcaaattatcgatacgcgac

SEQ ID NO: 14736 - DNA, 21 bp, synthetic construct
  misc_feature 1..21: note = Synthetic construct
  source 1..21: mol_type = other DNA
agagagtcaccacgcggcgtt

SEQ ID NO: 14737 - DNA, 23 bp, synthetic construct
  misc_feature 1..23: note = Synthetic construct
  source 1..23: mol_type = other DNA
aacgcctgagcagcctcaagcga

SEQ ID NO: 14738 - DNA, 22 bp, synthetic construct
  misc_feature 1..22: note = Synthetic construct
  source 1..22: mol_type = other DNA
ccccgattgggaaggcgtcgcc

SEQ ID NO: 14739 - DNA, 23 bp, synthetic construct
  misc_feature 1..23: note = Synthetic construct
  source 1..23: mol_type = other DNA
gttaagatctttagcgccagcaa

SEQ ID NO: 14740 - DNA, 22 bp, synthetic construct
  misc_feature 1..22: note = Synthetic construct
  source 1..22: mol_type = other DNA
tgagcgggccgtgcgacgagga

SEQ ID NO: 14741 - DNA, 21 bp, synthetic construct
  misc_feature 1..21: note = Synthetic construct
  source 1..21: mol_type = other DNA
agggccattgctatagtccgg

SEQ ID NO: 14742 - DNA, 22 bp, synthetic construct
  misc_feature 1..22: note = Synthetic construct
  source 1..22: mol_type = other DNA
acctgtatgcaaattcacgctt

SEQ ID NO: 14743 - DNA, 23 bp, synthetic construct
  misc_feature 1..23: note = Synthetic construct
  source 1..23: mol_type = other DNA
aatattccctacgaaacgggtgg

SEQ ID NO: 14744 - DNA, 21 bp, synthetic construct
  misc_feature 1..21: note = Synthetic construct
  source 1..21: mol_type = other DNA
ataagaggggggccacaccag

SEQ ID NO: 14745 - DNA, 21 bp, synthetic construct
  misc_feature 1..21: note = Synthetic construct
  source 1..21: mol_type = other DNA
gactttccattcgcggggatt

SEQ ID NO: 14746 - DNA, 23 bp, synthetic construct
  misc_feature 1..23: note = Synthetic construct
  source 1..23: mol_type = other DNA
tgggaacccttagacggggtggc

SEQ ID NO: 14747 - DNA, 21 bp, synthetic construct
  misc_feature 1..21: note = Synthetic construct
  source 1..21: mol_type = other DNA
tcctgctaacgcttggtcaga

SEQ ID NO: 14748 - DNA, 23 bp, synthetic construct
  misc_feature 1..23: note = Synthetic construct
  source 1..23: mol_type = other DNA
ccagactggtcgctgacgagact

SEQ ID NO: 14749 - DNA, 21 bp, synthetic construct
  misc_feature 1..21: note = Synthetic construct
  source 1..21: mol_type = other DNA
cccggctgggccattttatta

SEQ ID NO: 14750 - DNA, 20 bp, synthetic construct
  misc_feature 1..20: note = Synthetic construct
  source 1..20: mol_type = other DNA
gtaccagttgtcagctattt

SEQ ID NO: 14751 - DNA, 21 bp, synthetic construct
  misc_feature 1..21: note = Synthetic construct
  source 1..21: mol_type = other DNA
caaccgattgttttcgaggcg

SEQ ID NO: 14752 - DNA, 22 bp, synthetic construct
  misc_feature 1..22: note = Synthetic construct
  source 1..22: mol_type = other DNA
catgcctcccgaccccccttta

SEQ ID NO: 14753 - DNA, 22 bp, synthetic construct
  misc_feature 1..22: note = Synthetic construct
  source 1..22: mol_type = other DNA
tgtgtatacggatcttggtcac

SEQ ID NO: 14754 - DNA, 20 bp, synthetic construct
  misc_feature 1..20: note = Synthetic construct
  source 1..20: mol_type = other DNA
tcgctaatgccttcagtggc

SEQ ID NO: 14755 - DNA, 20 bp, synthetic construct
  misc_feature 1..20: note = Synthetic construct
  source 1..20: mol_type = other DNA
gatccttccatcgatgcccg

SEQ ID NO: 14756 - DNA, 23 bp, synthetic construct
  misc_feature 1..23: note = Synthetic construct
  source 1..23: mol_type = other DNA
tcgttatttgataagcgtattca

SEQ ID NO: 14757 - DNA, 22 bp, synthetic construct
  misc_feature 1..22: note = Synthetic construct
  source 1..22: mol_type = other DNA
ttaggacttttatcatccgaac

SEQ ID NO: 14758 - DNA, 21 bp, synthetic construct
  misc_feature 1..21: note = Synthetic construct
  source 1..21: mol_type = other DNA
ccagcgagctcgcagtatagg

SEQ ID NO: 14759 - DNA, 21 bp, synthetic construct
  misc_feature 1..21: note = Synthetic construct
  source 1..21: mol_type = other DNA
actatcaggccaggcggtcct

SEQ ID NO: 14760 - DNA, 23 bp, synthetic construct
  misc_feature 1..23: note = Synthetic construct
  source 1..23: mol_type = other DNA
tcacgccgagcgagtgtgcatgc

SEQ ID NO: 14761 - DNA, 22 bp, synthetic construct
  misc_feature 1..22: note = Synthetic construct
  source 1..22: mol_type = other DNA
acgacgcgaagtgacgcccatt

SEQ ID NO: 14762 - DNA, 21 bp, synthetic construct
  misc_feature 1..21: note = Synthetic construct
  source 1..21: mol_type = other DNA
cgtcttaaaattagccgtatt

SEQ ID NO: 14763 - DNA, 20 bp, synthetic construct
  misc_feature 1..20: note = Synthetic construct
  source 1..20: mol_type = other DNA
caagctcttgtgtctgatcg

SEQ ID NO: 14764 - DNA, 20 bp, synthetic construct
  misc_feature 1..20: note = Synthetic construct
  source 1..20: mol_type = other DNA
cgggccgtccttccagatag

SEQ ID NO: 14765 - DNA, 21 bp, synthetic construct
  misc_feature 1..21: note = Synthetic construct
  source 1..21: mol_type = other DNA
cgtaggggccctggccacctc

SEQ ID NO: 14766 - DNA, 21 bp, synthetic construct
  misc_feature 1..21: note = Synthetic construct
  source 1..21: mol_type = other DNA
gcgtctgaacctcggatcgta

SEQ ID NO: 14767 - DNA, 22 bp, synthetic construct
  misc_feature 1..22: note = Synthetic construct
  source 1..22: mol_type = other DNA
gaagacgcgcactggagaggag

SEQ ID NO: 14768 - DNA, 20 bp, synthetic construct
  misc_feature 1..20: note = Synthetic construct
  source 1..20: mol_type = other DNA
gcagcaggtcgctgccacgg

SEQ ID NO: 14769 - DNA, 21 bp, synthetic construct
  misc_feature 1..21: note = Synthetic construct
  source 1..21: mol_type = other DNA
tgtgcgagttataggtgccag

SEQ ID NO: 14770 - DNA, 22 bp, synthetic construct
  misc_feature 1..22: note = Synthetic construct
  source 1..22: mol_type = other DNA
aatcgcctaacggatctcatat

SEQ ID NO: 14771 - DNA, 23 bp, synthetic construct
  misc_feature 1..23: note = Synthetic construct
  source 1..23: mol_type = other DNA
atcgtttacccggcgcccctatt

SEQ ID NO: 14772 - DNA, 21 bp, synthetic construct
  misc_feature 1..21: note = Synthetic construct
  source 1..21: mol_type = other DNA
catgggtccacatggcggcga

SEQ ID NO: 14773 - DNA, 21 bp, synthetic construct
  misc_feature 1..21: note = Synthetic construct
  source 1..21: mol_type = other DNA
aaaggtgaataccgagatatt

SEQ ID NO: 14774 - DNA, 23 bp, synthetic construct
  misc_feature 1..23: note = Synthetic construct
  source 1..23: mol_type = other DNA
cacccgccctccagattgttagc

SEQ ID NO: 14775 - DNA, 20 bp, synthetic construct
  misc_feature 1..20: note = Synthetic construct
  source 1..20: mol_type = other DNA
cgcgcattcatgggttttag

SEQ ID NO: 14776 - DNA, 21 bp, synthetic construct
  misc_feature 1..21: note = Synthetic construct
  source 1..21: mol_type = other DNA
gactgtctcaccgactacagt

SEQ ID NO: 14777 - DNA, 22 bp, synthetic construct
  misc_feature 1..22: note = Synthetic construct
  source 1..22: mol_type = other DNA
atcgcaccgtcactgctcctct

SEQ ID NO: 14778 - DNA, 21 bp, synthetic construct
  misc_feature 1..21: note = Synthetic construct
  source 1..21: mol_type = other DNA
cgggtgcctatctcgtgtggc

SEQ ID NO: 14779 - DNA, 22 bp, synthetic construct
  misc_feature 1..22: note = Synthetic construct
  source 1..22: mol_type = other DNA
gtattacgaataaatgggacga

SEQ ID NO: 14780 - DNA, 23 bp, synthetic construct
  misc_feature 1..23: note = Synthetic construct
  source 1..23: mol_type = other DNA
ggaagttgtgaaccgtctcagta

SEQ ID NO: 14781 - DNA, 21 bp, synthetic construct
  misc_feature 1..21: note = Synthetic construct
  source 1..21: mol_type = other DNA
caggatagttaattcgggcgt

SEQ ID NO: 14782 - DNA, 22 bp, synthetic construct
  misc_feature 1..22: note = Synthetic construct
  source 1..22: mol_type = other DNA
gaaggccagtgactctgctctt

SEQ ID NO: 14783 - DNA, 20 bp, synthetic construct
  misc_feature 1..20: note = Synthetic construct
  source 1..20: mol_type = other DNA
ccttcaattccatgcgtgaa

SEQ ID NO: 14784 - DNA, 20 bp, synthetic construct
  misc_feature 1..20: note = Synthetic construct
  source 1..20: mol_type = other DNA
cttgcacggagcgaccttaa

SEQ ID NO: 14785 - DNA, 23 bp, synthetic construct
  misc_feature 1..23: note = Synthetic construct
  source 1..23: mol_type = other DNA
ctcacggactgatctacctccgg

SEQ ID NO: 14786 - DNA, 21 bp, synthetic construct
  misc_feature 1..21: note = Synthetic construct
  source 1..21: mol_type = other DNA
atccattacagcccgaccgcc

SEQ ID NO: 14787 - DNA, 20 bp, synthetic construct
  misc_feature 1..20: note = Synthetic construct
  source 1..20: mol_type = other DNA
aaactcgaaaacgcgacgtg

SEQ ID NO: 14788 - DNA, 20 bp, synthetic construct
  misc_feature 1..20: note = Synthetic construct
  source 1..20: mol_type = other DNA
tttgcctgatgaataaatat

SEQ ID NO: 14789 - DNA, 20 bp, synthetic construct
  misc_feature 1..20: note = Synthetic construct
  source 1..20: mol_type = other DNA
tatcagttagctgcggcgcg

SEQ ID NO: 14790 - DNA, 23 bp, synthetic construct
  misc_feature 1..23: note = Synthetic construct
  source 1..23: mol_type = other DNA
ctctcaaaaggctttgactgggt

SEQ ID NO: 14791 - DNA, 20 bp, synthetic construct
  misc_feature 1..20: note = Synthetic construct
  source 1..20: mol_type = other DNA
ctcaaggaaggcctgcgata

SEQ ID NO: 14792 - DNA, 21 bp, synthetic construct
  misc_feature 1..21: note = Synthetic construct
  source 1..21: mol_type = other DNA
ctaagactaatcgtgaggaag

SEQ ID NO: 14793 - DNA, 22 bp, synthetic construct
  misc_feature 1..22: note = Synthetic construct
  source 1..22: mol_type = other DNA
tcgctgcgacaagccccttcga

SEQ ID NO: 14794 - DNA, 20 bp, synthetic construct
  misc_feature 1..20: note = Synthetic construct
  source 1..20: mol_type = other DNA
ctttctggtcgggacctttc

SEQ ID NO: 14795 - DNA, 21 bp, synthetic construct
  misc_feature 1..21: note = Synthetic construct
  source 1..21: mol_type = other DNA
gaaaatccggtacgtctcatc

SEQ ID NO: 14796 - DNA, 20 bp, synthetic construct
  misc_feature 1..20: note = Synthetic construct
  source 1..20: mol_type = other DNA
gatcagatgcggggtagcag

SEQ ID NO: 14797 - DNA, 21 bp, synthetic construct
  misc_feature 1..21: note = Synthetic construct
  source 1..21: mol_type = other DNA
tcggcctgcacgccacgagta

SEQ ID NO: 14798 - DNA, 20 bp, synthetic construct
  misc_feature 1..20: note = Synthetic construct
  source 1..20: mol_type = other DNA
agacagttataaggcaggtc

SEQ ID NO: 14799 - DNA, 20 bp, synthetic construct
  misc_feature 1..20: note = Synthetic construct
  source 1..20: mol_type = other DNA
agggccagacgaagcatcgc

SEQ ID NO: 14800 - DNA, 20 bp, synthetic construct
  misc_feature 1..20: note = Synthetic construct
  source 1..20: mol_type = other DNA
tgtaaatgcccttacaactg

SEQ ID NO: 14801 - DNA, 20 bp, synthetic construct
  misc_feature 1..20: note = Synthetic construct
  source 1..20: mol_type = other DNA
gcgtacgccgtgattgcgtg

SEQ ID NO: 14802 - DNA, 22 bp, synthetic construct
  misc_feature 1..22: note = Synthetic construct
  source 1..22: mol_type = other DNA
ccgacggcaaaaaatgtttacc

SEQ ID NO: 14803 - DNA, 23 bp, synthetic construct
  misc_feature 1..23: note = Synthetic construct
  source 1..23: mol_type = other DNA
cgtgggacacagcctccgcccag

SEQ ID NO: 14804 - DNA, 23 bp, synthetic construct
  misc_feature 1..23: note = Synthetic construct
  source 1..23: mol_type = other DNA
taactgctcgagggtcggctatc

SEQ ID NO: 14805 - DNA, 22 bp, synthetic construct
  misc_feature 1..22: note = Synthetic construct
  source 1..22: mol_type = other DNA
aaattattcgcctaactgctgg

SEQ ID NO: 14806 - DNA, 22 bp, synthetic construct
  misc_feature 1..22: note = Synthetic construct
  source 1..22: mol_type = other DNA
gaagacgttcgcctagccggtc

SEQ ID NO: 14807 - DNA, 22 bp, synthetic construct
  misc_feature 1..22: note = Synthetic construct
  source 1..22: mol_type = other DNA
ccatcccatgtttgatgaaaca

SEQ ID NO: 14808 - DNA, 22 bp, synthetic construct
  misc_feature 1..22: note = Synthetic construct
  source 1..22: mol_type = other DNA
caagcccgaccagggcagtagc

SEQ ID NO: 14809 - DNA, 21 bp, synthetic construct
  misc_feature 1..21: note = Synthetic construct
  source 1..21: mol_type = other DNA
atcctagacagcccgtgatgc

SEQ ID NO: 14810 - DNA, 23 bp, synthetic construct
  misc_feature 1..23: note = Synthetic construct
  source 1..23: mol_type = other DNA
taggacttgttcaacatctcggc

SEQ ID NO: 14811 - DNA, 22 bp, synthetic construct
  misc_feature 1..22: note = Synthetic construct
  source 1..22: mol_type = other DNA
tgagcttgtccgtcagccattc

SEQ ID NO: 14812 - DNA, 23 bp, synthetic construct
  misc_feature 1..23: note = Synthetic construct
  source 1..23: mol_type = other DNA
gttcaattacgcacagcgtaatg

SEQ ID NO: 14813 - DNA, 23 bp, synthetic construct
  misc_feature 1..23: note = Synthetic construct
  source 1..23: mol_type = other DNA
tatcccggactaggggtagaccg

SEQ ID NO: 14814 - DNA, 22 bp, synthetic construct
  misc_feature 1..22: note = Synthetic construct
  source 1..22: mol_type = other DNA
accgaagctggcttgttggtcg

SEQ ID NO: 14815 - DNA, 20 bp, synthetic construct
  misc_feature 1..20: note = Synthetic construct
  source 1..20: mol_type = other DNA
agatcatagttgagcatgac

SEQ ID NO: 14816 - DNA, 20 bp, synthetic construct
  misc_feature 1..20: note = Synthetic construct
  source 1..20: mol_type = other DNA
ttgcggaataccttatcaac

SEQ ID NO: 14817 - DNA, 21 bp, synthetic construct
  misc_feature 1..21: note = Synthetic construct
  source 1..21: mol_type = other DNA
aagcctactacgcaaacccag

SEQ ID NO: 14818 - DNA, 20 bp, synthetic construct
  misc_feature 1..20: note = Synthetic construct
  source 1..20: mol_type = other DNA
attgggcgcgcatgatagca

SEQ ID NO: 14819 - DNA, 20 bp, synthetic construct
  misc_feature 1..20: note = Synthetic construct
  source 1..20: mol_type = other DNA
tatgggaaaatactcaagat

SEQ ID NO: 14820 - DNA, 23 bp, synthetic construct
  misc_feature 1..23: note = Synthetic construct
  source 1..23: mol_type = other DNA
caagcctccagcaagcttctcga

SEQ ID NO: 14821 - DNA, 22 bp, synthetic construct
  misc_feature 1..22: note = Synthetic construct
  source 1..22: mol_type = other DNA
gattacgtgtacggacacctct

SEQ ID NO: 14822 - DNA, 23 bp, synthetic construct
  misc_feature 1..23: note = Synthetic construct
  source 1..23: mol_type = other DNA
ctcgtccgtcatctgcctggcgg

SEQ ID NO: 14823 - DNA, 22 bp, synthetic construct
  misc_feature 1..22: note = Synthetic construct
  source 1..22: mol_type = other DNA
atagtacatctacataggctca

SEQ ID NO: 14824 - DNA, 22 bp, synthetic construct
  misc_feature 1..22: note = Synthetic construct
  source 1..22: mol_type = other DNA
cctcaaaagcgtattcgggtgg

SEQ ID NO: 14825 - DNA, 20 bp, synthetic construct
  misc_feature 1..20: note = Synthetic construct
  source 1..20: mol_type = other DNA
cgtctagcagttgcgactat

SEQ ID NO: 14826 - DNA, 20 bp, synthetic construct
  misc_feature 1..20: note = Synthetic construct
  source 1..20: mol_type = other DNA
gtggttttgcgcgaatccga

SEQ ID NO: 14827 - DNA, 20 bp, synthetic construct
  misc_feature 1..20: note = Synthetic construct
  source 1..20: mol_type = other DNA
tactaccggggaattaactt

SEQ ID NO: 14828 - DNA, 22 bp, synthetic construct
  misc_feature 1..22: note = Synthetic construct
  source 1..22: mol_type = other DNA
gttggtttgtccgtaacgagtt

SEQ ID NO: 14829 - DNA, 23 bp, synthetic construct
  misc_feature 1..23: note = Synthetic construct
  source 1..23: mol_type = other DNA
tcacgatattatcgtaaagaacc

SEQ ID NO: 14830 - DNA, 20 bp, synthetic construct
  misc_feature 1..20: note = Synthetic construct
  source 1..20: mol_type = other DNA
taatatccctcgcattgcag

SEQ ID NO: 14831 - DNA, 20 bp, synthetic construct
  misc_feature 1..20: note = Synthetic construct
  source 1..20: mol_type = other DNA
cactgttatgcttacccaaa

SEQ ID NO: 14832 - DNA, 23 bp, synthetic construct
  misc_feature 1..23: note = Synthetic construct
  source 1..23: mol_type = other DNA
accaatgaggcgcgattcctcgt

SEQ ID NO: 14833 - DNA, 22 bp, synthetic construct
  misc_feature 1..22: note = Synthetic construct
  source 1..22: mol_type = other DNA
ttcgctctctagaactctgtac

SEQ ID NO: 14834 - DNA, 23 bp, synthetic construct
  misc_feature 1..23: note = Synthetic construct
  source 1..23: mol_type = other DNA
aaccgagcaaaaccccgcttcaa

SEQ ID NO: 14835 - DNA, 23 bp, synthetic construct
  misc_feature 1..23: note = Synthetic construct
  source 1..23: mol_type = other DNA
catggagcggtgtgagcacttcg

SEQ ID NO: 14836 - DNA, 20 bp, synthetic construct
  misc_feature 1..20: note = Synthetic construct
  source 1..20: mol_type = other DNA
ccgcggagtattgcgcttaa

SEQ ID NO: 14837 - DNA, 21 bp, synthetic construct
  misc_feature 1..21: note = Synthetic construct
  source 1..21: mol_type = other DNA
agtacacgcccacaactattc

SEQ ID NO: 14838 - DNA, 20 bp, synthetic construct
  misc_feature 1..20: note = Synthetic construct
  source 1..20: mol_type = other DNA
gaggtagtcacggggctcta

SEQ ID NO: 14839 - DNA, 22 bp, synthetic construct
  misc_feature 1..22: note = Synthetic construct
  source 1..22: mol_type = other DNA
agactcagctccagagaagact

SEQ ID NO: 14840 - DNA, 22 bp, synthetic construct
  misc_feature 1..22: note = Synthetic construct
  source 1..22: mol_type = other DNA
aactcctaggtacctgcacgcg

SEQ ID NO: 14841 - DNA, 21 bp, synthetic construct
  misc_feature 1..21: note = Synthetic construct
  source 1..21: mol_type = other DNA
tcctcgaatagcagatagctt

SEQ ID NO: 14842 - DNA, 20 bp, synthetic construct
  misc_feature 1..20: note = Synthetic construct
  source 1..20: mol_type = other DNA
ctatcgaatatgcaacacgt

SEQ ID NO: 14843 - DNA, 21 bp, synthetic construct
  misc_feature 1..21: note = Synthetic construct
  source 1..21: mol_type = other DNA
acccgatcctgtctcgcctgc

SEQ ID NO: 14844 - DNA, 23 bp, synthetic construct
  misc_feature 1..23: note = Synthetic construct
  source 1..23: mol_type = other DNA
gttcatcggatgttccagaaagt

SEQ ID NO: 14845 - DNA, 22 bp, synthetic construct
  misc_feature 1..22: note = Synthetic construct
  source 1..22: mol_type = other DNA
agggcctcctaccaagctactg

SEQ ID NO: 14846 - DNA, 23 bp, synthetic construct
  misc_feature 1..23: note = Synthetic construct
  source 1..23: mol_type = other DNA
cgggggccccttgctcgccaaga

SEQ ID NO: 14847 - DNA, 23 bp, synthetic construct
  misc_feature 1..23: note = Synthetic construct
  source 1..23: mol_type = other DNA
gtaccaacgtggggacgcgttgt

SEQ ID NO: 14848 - DNA, 23 bp, synthetic construct
  misc_feature 1..23: note = Synthetic construct
  source 1..23: mol_type = other DNA
acttacggtatgacacggtttta

SEQ ID NO: 14849 - DNA, 21 bp, synthetic construct
  misc_feature 1..21: note = Synthetic construct
  source 1..21: mol_type = other DNA
ttccaggctctcagctgcgtc

SEQ ID NO: 14850 - DNA, 23 bp, synthetic construct
  misc_feature 1..23: note = Synthetic construct
  source 1..23: mol_type = other DNA
ccctaagagctgtccaccacgcc

SEQ ID NO: 14851 - DNA, 20 bp, synthetic construct
  misc_feature 1..20: note = Synthetic construct
  source 1..20: mol_type = other DNA
ttcctcctactcgcagatgg

SEQ ID NO: 14852 - DNA, 22 bp, synthetic construct
  misc_feature 1..22: note = Synthetic construct
  source 1..22: mol_type = other DNA
taaggcaatgttttcagcaagt

SEQ ID NO: 14853 - DNA, 22 bp, synthetic construct
  misc_feature 1..22: note = Synthetic construct
  source 1..22: mol_type = other DNA
ggataattattggggtttctca

SEQ ID NO: 14854 - DNA, 22 bp, synthetic construct
  misc_feature 1..22: note = Synthetic construct
  source 1..22: mol_type = other DNA
ttgcctcgaccgggaagacact

SEQ ID NO: 14855 - DNA, 21 bp, synthetic construct
  misc_feature 1..21: note = Synthetic construct
  source 1..21: mol_type = other DNA
cccacgcgctaattgcccaca

SEQ ID NO: 14856 - DNA, 22 bp, synthetic construct
  misc_feature 1..22: note = Synthetic construct
  source 1..22: mol_type = other DNA
gcgtagcagcatcctacgaacc

SEQ ID NO: 14857 - DNA, 20 bp, synthetic construct
  misc_feature 1..20: note = Synthetic construct
  source 1..20: mol_type = other DNA
tgtaatttcggttcctaaaa

SEQ ID NO: 14858 - DNA, 22 bp, synthetic construct
  misc_feature 1..22: note = Synthetic construct
  source 1..22: mol_type = other DNA
caacctcaaaagatatgttcga

SEQ ID NO: 14859 - DNA, 23 bp, synthetic construct
  misc_feature 1..23: note = Synthetic construct
  source 1..23: mol_type = other DNA
acagaaggcgacgttccacgcga

SEQ ID NO: 14860 - DNA, 23 bp, synthetic construct
  misc_feature 1..23: note = Synthetic construct
  source 1..23: mol_type = other DNA
tgagcgaggagagtctgagagcg

SEQ ID NO: 14861 - DNA, 20 bp, synthetic construct
  misc_feature 1..20: note = Synthetic construct
  source 1..20: mol_type = other DNA
gatgagtttataaatcgtaa

SEQ ID NO: 14862 - DNA, 23 bp, synthetic construct
  misc_feature 1..23: note = Synthetic construct
  source 1..23: mol_type = other DNA
attatggcgagaaggggcctgac

SEQ ID NO: 14863 - DNA, 20 bp, synthetic construct
  misc_feature 1..20: note = Synthetic construct
  source 1..20: mol_type = other DNA
ttatttatatctactagcgt

SEQ ID NO: 14864 - DNA, 23 bp, synthetic construct
  misc_feature 1..23: note = Synthetic construct
  source 1..23: mol_type = other DNA
acacttaattgcttgcgtaggta

SEQ ID NO: 14865 - DNA, 22 bp, synthetic construct
  misc_feature 1..22: note = Synthetic construct
  source 1..22: mol_type = other DNA
acacttcaagctaggcccgggg

SEQ ID NO: 14866 - DNA, 23 bp, synthetic construct
  misc_feature 1..23: note = Synthetic construct
  source 1..23: mol_type = other DNA
atttcgcactgcttgtagctgga

SEQ ID NO: 14867 - DNA, 23 bp, synthetic construct
  misc_feature 1..23: note = Synthetic construct
  source 1..23: mol_type = other DNA
ctgctgcttttaacaacaaccgg

SEQ ID NO: 14868 - DNA, 20 bp, synthetic construct
  misc_feature 1..20: note = Synthetic construct
  source 1..20: mol_type = other DNA
tggctacatgcgaattacgc

SEQ ID NO: 14869 - DNA, 23 bp, synthetic construct
  misc_feature 1..23: note = Synthetic construct
  source 1..23: mol_type = other DNA
cttcagatggagataggtccagt

SEQ ID NO: 14870 - DNA, 23 bp, synthetic construct
  misc_feature 1..23: note = Synthetic construct
  source 1..23: mol_type = other DNA
ccttagggcccaaatgagaaatg

SEQ ID NO: 14871 - DNA, 22 bp, synthetic construct
  misc_feature 1..22: note = Synthetic construct
  source 1..22: mol_type = other DNA
taaatggcactcgtttggacta

SEQ ID NO: 14872 - DNA, 22 bp, synthetic construct
  misc_feature 1..22: note = Synthetic construct
  source 1..22: mol_type = other DNA
atggatttttgttcccctcaaa

SEQ ID NO: 14873 - DNA, 20 bp, synthetic construct
  misc_feature 1..20: note = Synthetic construct
  source 1..20: mol_type = other DNA
ggccatcttcccaccttacc

SEQ ID NO: 14874 - DNA, 22 bp, synthetic construct
  misc_feature 1..22: note = Synthetic construct
  source 1..22: mol_type = other DNA
acagctaaagcatatgtaattt

SEQ ID NO: 14875 - DNA, 23 bp, synthetic construct
  misc_feature 1..23: note = Synthetic construct
  source 1..23: mol_type = other DNA
caacacgtactgcttctcagcac

SEQ ID NO: 14876 - DNA, 22 bp, synthetic construct
  misc_feature 1..22: note = Synthetic construct
  source 1..22: mol_type = other DNA
gtatctgagtcccggccgactg

SEQ ID NO: 14877 - DNA, 22 bp, synthetic construct
  misc_feature 1..22: note = Synthetic construct
  source 1..22: mol_type = other DNA
atctgggacgggtacccagtgc

SEQ ID NO: 14878 - DNA, 20 bp, synthetic construct
  misc_feature 1..20: note = Synthetic construct
  source 1..20: mol_type = other DNA
tatgacctccactttagtgg

SEQ ID NO: 14879 - DNA, 21 bp, synthetic construct
  misc_feature 1..21: note = Synthetic construct
  source 1..21: mol_type = other DNA
caagtgtccgaatgtttcatt

SEQ ID NO: 14880 - DNA, 22 bp, synthetic construct
  misc_feature 1..22: note = Synthetic construct
  source 1..22: mol_type = other DNA
tctatttatctcttccaaagaa

SEQ ID NO: 14881 - DNA, 23 bp, synthetic construct
  misc_feature 1..23: note = Synthetic construct
  source 1..23: mol_type = other DNA
cgtacttcaggcggccgcacgcg

SEQ ID NO: 14882 - DNA, 23 bp, synthetic construct
  misc_feature 1..23: note = Synthetic construct
  source 1..23: mol_type = other DNA
tgcttaacgagtgtttcgtaggc

SEQ ID NO: 14883 - DNA, 20 bp, synthetic construct
  misc_feature 1..20: note = Synthetic construct
  source 1..20: mol_type = other DNA
tggaggagagaccgatggct

SEQ ID NO: 14884 - DNA, 23 bp, synthetic construct
  misc_feature 1..23: note = Synthetic construct
  source 1..23: mol_type = other DNA
gcgggactacgactataatttag

SEQ ID NO: 14885 - DNA, 23 bp, synthetic construct
  misc_feature 1..23: note = Synthetic construct
  source 1..23: mol_type = other DNA
ttccccagccacgaaagtagtct

SEQ ID NO: 14886 - DNA, 21 bp, synthetic construct
  misc_feature 1..21: note = Synthetic construct
  source 1..21: mol_type = other DNA
cagtaccctaggcctacaaaa

SEQ ID NO: 14887 - DNA, 20 bp, synthetic construct
  misc_feature 1..20: note = Synthetic construct
  source 1..20: mol_type = other DNA
aaatggttagttaacgaaga

SEQ ID NO: 14888 - DNA, 22 bp, synthetic construct
  misc_feature 1..22: note = Synthetic construct
  source 1..22: mol_type = other DNA
aaaaggtgttaccctttaccca

SEQ ID NO: 14889 - DNA, 21 bp, synthetic construct
  misc_feature 1..21: note = Synthetic construct
  source 1..21: mol_type = other DNA
tcgtctccggtccagctgtcg

SEQ ID NO: 14890 - DNA, 23 bp, synthetic construct
  misc_feature 1..23: note = Synthetic construct
  source 1..23: mol_type = other DNA
gttcaatctaccggcagacagca

SEQ ID NO: 14891 - DNA, 22 bp, synthetic construct
  misc_feature 1..22: note = Synthetic construct
  source 1..22: mol_type = other DNA
ctaggtgcggagatattccaca

SEQ ID NO: 14892 - DNA, 20 bp, synthetic construct
  misc_feature 1..20: note = Synthetic construct
  source 1..20: mol_type = other DNA
accgcggtccgcgaggcgat

SEQ ID NO: 14893 - DNA, 20 bp, synthetic construct
  misc_feature 1..20: note = Synthetic construct
  source 1..20: mol_type = other DNA
gggtacagcttctgttgttt

SEQ ID NO: 14894 - DNA, 23 bp, synthetic construct
  misc_feature 1..23: note = Synthetic construct
  source 1..23: mol_type = other DNA
acagcttctgttgtttcttcaag

SEQ ID NO: 14895 - DNA, 23 bp, synthetic construct
  misc_feature 1..23: note = Synthetic construct
  source 1..23: mol_type = other DNA
tccctgcttaacgagtgtttcgt

SEQ ID NO: 14896 - DNA, 20 bp, synthetic construct
  misc_feature 1..20: note = Synthetic construct
  source 1..20: mol_type = other DNA
gcacctagtctgtgcgccag

SEQ ID NO: 14897 - DNA, 23 bp, synthetic construct
  misc_feature 1..23: note = Synthetic construct
  source 1..23: mol_type = other DNA
gagggatgcccacctgacacctc

SEQ ID NO: 14898 - DNA, 23 bp, synthetic construct
  misc_feature 1..23: note = Synthetic construct
  source 1..23: mol_type = other DNA
gcaagtgtccgaatgtttcattg

SEQ ID NO: 14899 - DNA, 22 bp, synthetic construct
  misc_feature 1..22: note = Synthetic construct
  source 1..22: mol_type = other DNA
gcgtttatgtggtagtttcagc

SEQ ID NO: 14900 - DNA, 21 bp, synthetic construct
  misc_feature 1..21: note = Synthetic construct
  source 1..21: mol_type = other DNA
ataagtgccccccgcaattca

SEQ ID NO: 14901 - DNA, 23 bp, synthetic construct
  misc_feature 1..23: note = Synthetic construct
  source 1..23: mol_type = other DNA
agccatatgtggttctgaggcat

SEQ ID NO: 14902 - DNA, 22 bp, synthetic construct
  misc_feature 1..22: note = Synthetic construct
  source 1..22: mol_type = other DNA
ctccatacagtctaggtgcgga

SEQ ID NO: 14903 - DNA, 22 bp, synthetic construct
  misc_feature 1..22: note = Synthetic construct
  source 1..22: mol_type = other DNA
ctacgtcgcggaatgttcttca

SEQ ID NO: 14904 - DNA, 21 bp, synthetic construct
  misc_feature 1..21: note = Synthetic construct
  source 1..21: mol_type = other DNA
cgacgtttgaaggtctgttgc

SEQ ID NO: 14905 - DNA, 23 bp, synthetic construct
  misc_feature 1..23: note = Synthetic construct
  source 1..23: mol_type = other DNA
cttgctctggaagcaggggaggc

SEQ ID NO: 14906 - DNA, 23 bp, synthetic construct
  misc_feature 1..23: note = Synthetic construct
  source 1..23: mol_type = other DNA
tcaagttgagaaatacataacta

SEQ ID NO: 14907 - DNA, 21 bp, synthetic construct
  misc_feature 1..21: note = Synthetic construct
  source 1..21: mol_type = other DNA
ctagttggtcgcagaccgagt

SEQ ID NO: 14908 - DNA, 21 bp, synthetic construct
  misc_feature 1..21: note = Synthetic construct
  source 1..21: mol_type = other DNA
tgatggggagaggcataagtg

SEQ ID NO: 14909 - DNA, 21 bp, synthetic construct
  misc_feature 1..21: note = Synthetic construct
  source 1..21: mol_type = other DNA
ggacattcggttttgaactga

SEQ ID NO: 14910 - DNA, 21 bp, synthetic construct
  misc_feature 1..21: note = Synthetic construct
  source 1..21: mol_type = other DNA
gccgagaggagggtccacgga

SEQ ID NO: 14911 - DNA, 21 bp, synthetic construct
  misc_feature 1..21: note = Synthetic construct
  source 1..21: mol_type = other DNA
cacacccatgccgagaggagg

SEQ ID NO: 14912 - DNA, 21 bp, synthetic construct
  misc_feature 1..21: note = Synthetic construct
  source 1..21: mol_type = other DNA
gggcacacgatctccgtgaac

SEQ ID NO: 14913 - DNA, 22 bp, synthetic construct
  misc_feature 1..22: note = Synthetic construct
  source 1..22: mol_type = other DNA
ggttgccacgaggataccccgt

SEQ ID NO: 14914 - DNA, 20 bp, synthetic construct
  misc_feature 1..20: note = Synthetic construct
  source 1..20: mol_type = other DNA
ccactaggcgtgtcactgct

SEQ ID NO: 14915 - DNA, 22 bp, synthetic construct
  misc_feature 1..22: note = Synthetic construct
  source 1..22: mol_type = other DNA
atttgctacgtgcaaaccgtac

SEQ ID NO: 14916 - DNA, 23 bp, synthetic construct
  misc_feature 1..23: note = Synthetic construct
  source 1..23: mol_type = other DNA
tagagctagcataggcgagtgtg

SEQ ID NO: 14917 - DNA, 22 bp, synthetic construct
  misc_feature 1..22: note = Synthetic construct
  source 1..22: mol_type = other DNA
catggaggtctttccccagcca

SEQ ID NO: 14918 - DNA, 22 bp, synthetic construct
  misc_feature 1..22: note = Synthetic construct
  source 1..22: mol_type = other DNA
gctatctgaatagcagacgtag

SEQ ID NO: 14919 - DNA, 20 bp, synthetic construct
  misc_feature 1..20: note = Synthetic construct
  source 1..20: mol_type = other DNA
tgaacggatgatgccaaaat

SEQ ID NO: 14920 - DNA, 20 bp, synthetic construct
  misc_feature 1..20: note = Synthetic construct
  source 1..20: mol_type = other DNA
tttcagctccacggatttca

SEQ ID NO: 14921 - DNA, 22 bp, synthetic construct
  misc_feature 1..22: note = Synthetic construct
  source 1..22: mol_type = other DNA
atgtttcattggacatcgcaag

SEQ ID NO: 14922 - DNA, 21 bp, synthetic construct
  misc_feature 1..21: note = Synthetic construct
  source 1..21: mol_type = other DNA
gctagcggaccacacctcaaa

SEQ ID NO: 14923 - DNA, 22 bp, synthetic construct
  misc_feature 1..22: note = Synthetic construct
  source 1..22: mol_type = other DNA
cgcttcacccagtagcacccca

SEQ ID NO: 14924 - DNA, 21 bp, synthetic construct
  misc_feature 1..21: note = Synthetic construct
  source 1..21: mol_type = other DNA
gctgatgatgcatcagtcggg

SEQ ID NO: 14925 - DNA, 22 bp, synthetic construct
  misc_feature 1..22: note = Synthetic construct
  source 1..22: mol_type = other DNA
aagggagtcgttagcgtcgttt

SEQ ID NO: 14926 - DNA, 22 bp, synthetic construct
  misc_feature 1..22: note = Synthetic construct
  source 1..22: mol_type = other DNA
agcaggggaggcaagcgcaaat

SEQ ID NO: 14927 - DNA, 22 bp, synthetic construct
  misc_feature 1..22: note = Synthetic construct
  source 1..22: mol_type = other DNA
aatgggtacagcttctgttgtt

SEQ ID NO: 14928 - DNA, 21 bp, synthetic construct
  misc_feature 1..21: note = Synthetic construct
  source 1..21: mol_type = other DNA
gaccttcgccactaggcgtgt

SEQ ID NO: 14929 - DNA, 23 bp, synthetic construct
  misc_feature 1..23: note = Synthetic construct
  source 1..23: mol_type = other DNA
gcgtgaagcctcaccgattgcgg

SEQ ID NO: 14930 - DNA, 23 bp, synthetic construct
  misc_feature 1..23: note = Synthetic construct
  source 1..23: mol_type = other DNA
agggtggtctcgatataagtata

SEQ ID NO: 14931 - DNA, 23 bp, synthetic construct
  misc_feature 1..23: note = Synthetic construct
  source 1..23: mol_type = other DNA
ttttgtgcaccggccgtccacca

SEQ ID NO: 14932 - DNA, 21 bp, synthetic construct
  misc_feature 1..21: note = Synthetic construct
  source 1..21: mol_type = other DNA
tcgacgtttgaaggtctgttg

SEQ ID NO: 14933 - DNA, 20 bp, synthetic construct
  misc_feature 1..20: note = Synthetic construct
  source 1..20: mol_type = other DNA
gtttaggcaaccatatctgg

SEQ ID NO: 14934 - DNA, 21 bp, synthetic construct
  misc_feature 1..21: note = Synthetic construct
  source 1..21: mol_type = other DNA
gctccctgggggcatttgccc

SEQ ID NO: 14935 - DNA, 23 bp, synthetic construct
  misc_feature 1..23: note = Synthetic construct
  source 1..23: mol_type = other DNA
gctctggaagcaggggaggcaag

SEQ ID NO: 14936 - DNA, 22 bp, synthetic construct
  misc_feature 1..22: note = Synthetic construct
  source 1..22: mol_type = other DNA
tgtcccgtgacgattccgggtt

SEQ ID NO: 14937 - DNA, 20 bp, synthetic construct
  misc_feature 1..20: note = Synthetic construct
  source 1..20: mol_type = other DNA
attattttatctagcccgac

SEQ ID NO: 14938 - DNA, 20 bp, synthetic construct
  misc_feature 1..20: note = Synthetic construct
  source 1..20: mol_type = other DNA
agctcttgcgttcaagaagt

SEQ ID NO: 14939 - DNA, 23 bp, synthetic construct
  misc_feature 1..23: note = Synthetic construct
  source 1..23: mol_type = other DNA
cgatataagtatagagctagcat

SEQ ID NO: 14940 - DNA, 21 bp, synthetic construct
  misc_feature 1..21: note = Synthetic construct
  source 1..21: mol_type = other DNA
gtatttgctacgtgcaaaccg

SEQ ID NO: 14941 - DNA, 21 bp, synthetic construct
  misc_feature 1..21: note = Synthetic construct
  source 1..21: mol_type = other DNA
atgcatttcagaggaaagagc

SEQ ID NO: 14942 - DNA, 21 bp, synthetic construct
  misc_feature 1..21: note = Synthetic construct
  source 1..21: mol_type = other DNA
tgtttggtcgtaggcatcgga

SEQ ID NO: 14943 - DNA, 22 bp, synthetic construct
  misc_feature 1..22: note = Synthetic construct
  source 1..22: mol_type = other DNA
aaatcgctctgcgatggtaccg

SEQ ID NO: 14944 - DNA, 20 bp, synthetic construct
  misc_feature 1..20: note = Synthetic construct
  source 1..20: mol_type = other DNA
ggcatgcagtccagccatga

SEQ ID NO: 14945 - DNA, 22 bp, synthetic construct
  misc_feature 1..22: note = Synthetic construct
  source 1..22: mol_type = other DNA
ctgcggccggtaagtttgtact

SEQ ID NO: 14946 - DNA, 21 bp, synthetic construct
  misc_feature 1..21: note = Synthetic construct
  source 1..21: mol_type = other DNA
ttccacacccatgccgagagg

SEQ ID NO: 14947 - DNA, 22 bp, synthetic construct
  misc_feature 1..22: note = Synthetic construct
  source 1..22: mol_type = other DNA
gcaagcttgacctgagggccag

SEQ ID NO: 14948 - DNA, 21 bp, synthetic construct
  misc_feature 1..21: note = Synthetic construct
  source 1..21: mol_type = other DNA
gggccagcaaaattgagctga

SEQ ID NO: 14949 - DNA, 20 bp, synthetic construct
  misc_feature 1..20: note = Synthetic construct
  source 1..20: mol_type = other DNA
ccatgattgtagttcaatct

SEQ ID NO: 14950 - DNA, 21 bp, synthetic construct
  misc_feature 1..21: note = Synthetic construct
  source 1..21: mol_type = other DNA
ctagtcgagattgagcgcaag

SEQ ID NO: 14951 - DNA, 23 bp, synthetic construct
  misc_feature 1..23: note = Synthetic construct
  source 1..23: mol_type = other DNA
gcagacagcataggtcgacgttt

SEQ ID NO: 14952 - DNA, 22 bp, synthetic construct
  misc_feature 1..22: note = Synthetic construct
  source 1..22: mol_type = other DNA
acaaatgtcaaggcttcttatt

SEQ ID NO: 14953 - DNA, 22 bp, synthetic construct
  misc_feature 1..22: note = Synthetic construct
  source 1..22: mol_type = other DNA
ggagcgctagaaagagagcttt

SEQ ID NO: 14954 - DNA, 22 bp, synthetic construct
  misc_feature 1..22: note = Synthetic construct
  source 1..22: mol_type = other DNA
gtgttgagcgctgcgtttggta

SEQ ID NO: 14955 - DNA, 23 bp, synthetic construct
  misc_feature 1..23: note = Synthetic construct
  source 1..23: mol_type = other DNA
cagtctaggtgcggagatattcc

SEQ ID NO: 14956 - DNA, 21 bp, synthetic construct
  misc_feature 1..21: note = Synthetic construct
  source 1..21: mol_type = other DNA
atacttatacatggaggtctt

SEQ ID NO: 14957 - DNA, 20 bp, synthetic construct
  misc_feature 1..20: note = Synthetic construct
  source 1..20: mol_type = other DNA
gcggatgccgtcagagccat

SEQ ID NO: 14958 - DNA, 22 bp, synthetic construct
  misc_feature 1..22: note = Synthetic construct
  source 1..22: mol_type = other DNA
ccattgatcgacgaaccgatca

SEQ ID NO: 14959 - DNA, 23 bp, synthetic construct
  misc_feature 1..23: note = Synthetic construct
  source 1..23: mol_type = other DNA
tttgctacgtgcaaaccgtacca

SEQ ID NO: 14960 - DNA, 20 bp, synthetic construct
  misc_feature 1..20: note = Synthetic construct
  source 1..20: mol_type = other DNA
cttccaagtggaagttctca

SEQ ID NO: 14961 - DNA, 21 bp, synthetic construct
  misc_feature 1..21: note = Synthetic construct
  source 1..21: mol_type = other DNA
ggctctggttacacgcggcac

SEQ ID NO: 14962 - DNA, 22 bp, synthetic construct
  misc_feature 1..22: note = Synthetic construct
  source 1..22: mol_type = other DNA
gaacagtaccctaggcctacaa

SEQ ID NO: 14963 - DNA, 23 bp, synthetic construct
  misc_feature 1..23: note = Synthetic construct
  source 1..23: mol_type = other DNA
aaccgtaccaacagcagagatcc

SEQ ID NO: 14964 - DNA, 22 bp, synthetic construct
  misc_feature 1..22: note = Synthetic construct
  source 1..22: mol_type = other DNA
acacgcggcacctagtctgtgc

SEQ ID NO: 14965 - DNA, 22 bp, synthetic construct
  misc_feature 1..22: note = Synthetic construct
  source 1..22: mol_type = other DNA
gatgatgccaaaatttggctta

SEQ ID NO: 14966 - DNA, 21 bp, synthetic construct
  misc_feature 1..21: note = Synthetic construct
  source 1..21: mol_type = other DNA
tgctctggaagcaggggaggc

SEQ ID NO: 14967 - DNA, 20 bp, synthetic construct
  misc_feature 1..20: note = Synthetic construct
  source 1..20: mol_type = other DNA
ttgccccacccacacgagct

SEQ ID NO: 14968 - DNA, 22 bp, synthetic construct
  misc_feature 1..22: note = Synthetic construct
  source 1..22: mol_type = other DNA
gagaagggacattcggttttga

SEQ ID NO: 14969 - DNA, 23 bp, synthetic construct
  misc_feature 1..23: note = Synthetic construct
  source 1..23: mol_type = other DNA
gtactgtttaggaacagtaccct

SEQ ID NO: 14970 - DNA, 21 bp, synthetic construct
  misc_feature 1..21: note = Synthetic construct
  source 1..21: mol_type = other DNA
ggtcgacgtttgaaggtctgt

SEQ ID NO: 14971 - DNA, 23 bp, synthetic construct
  misc_feature 1..23: note = Synthetic construct
  source 1..23: mol_type = other DNA
gcgcaagtgtccgaatgtttcat

SEQ ID NO: 14972 - DNA, 21 bp, synthetic construct
  misc_feature 1..21: note = Synthetic construct
  source 1..21: mol_type = other DNA
ggttagttaacgaagacagcg

SEQ ID NO: 14973 - DNA, 23 bp, synthetic construct
  misc_feature 1..23: note = Synthetic construct
  source 1..23: mol_type = other DNA
ctaggcctacaaaatgtttggtc

SEQ ID NO: 14974 - DNA, 22 bp, synthetic construct
  misc_feature 1..22: note = Synthetic construct
  source 1..22: mol_type = other DNA
ctatctagttccacggatgttc

SEQ ID NO: 14975 - DNA, 20 bp, synthetic construct
  misc_feature 1..20: note = Synthetic construct
  source 1..20: mol_type = other DNA
actgctccgctgggcagcat

SEQ ID NO: 14976 - DNA, 20 bp, synthetic construct
  misc_feature 1..20: note = Synthetic construct
  source 1..20: mol_type = other DNA
atgagtcaagcaagagcagc

SEQ ID NO: 14977 - DNA, 22 bp, synthetic construct
  misc_feature 1..22: note = Synthetic construct
  source 1..22: mol_type = other DNA
gtctttccccagccacgaaagt

SEQ ID NO: 14978 - DNA, 21 bp, synthetic construct
  misc_feature 1..21: note = Synthetic construct
  source 1..21: mol_type = other DNA
gaagcattttgcaagcacagg

SEQ ID NO: 14979 - DNA, 20 bp, synthetic construct
  misc_feature 1..20: note = Synthetic construct
  source 1..20: mol_type = other DNA
aactgaatgtagcttcacgg

SEQ ID NO: 14980 - DNA, 22 bp, synthetic construct
  misc_feature 1..22: note = Synthetic construct
  source 1..22: mol_type = other DNA
ggagcccaaaggcagaacgagc

SEQ ID NO: 14981 - DNA, 22 bp, synthetic construct
  misc_feature 1..22: note = Synthetic construct
  source 1..22: mol_type = other DNA
ggcagacagcataggtcgacgt

SEQ ID NO: 14982 - DNA, 21 bp, synthetic construct
  misc_feature 1..21: note = Synthetic construct
  source 1..21: mol_type = other DNA
atccatatcacacccttttcc

SEQ ID NO: 14983 - DNA, 23 bp, synthetic construct
  misc_feature 1..23: note = Synthetic construct
  source 1..23: mol_type = other DNA
tctattgagtaagagaaatttta

SEQ ID NO: 14984 - DNA, 22 bp, synthetic construct
  misc_feature 1..22: note = Synthetic construct
  source 1..22: mol_type = other DNA
gggagtcctcacacccggtcgc

SEQ ID NO: 14985 - DNA, 21 bp, synthetic construct
  misc_feature 1..21: note = Synthetic construct
  source 1..21: mol_type = other DNA
ttctacctttgggctaaggga

SEQ ID NO: 14986 - DNA, 22 bp, synthetic construct
  misc_feature 1..22: note = Synthetic construct
  source 1..22: mol_type = other DNA
ctaggcgtgtcactgctgaaat

SEQ ID NO: 14987 - DNA, 20 bp, synthetic construct
  misc_feature 1..20: note = Synthetic construct
  source 1..20: mol_type = other DNA
gctaccaggtatggaatcta

SEQ ID NO: 14988 - DNA, 20 bp, synthetic construct
  misc_feature 1..20: note = Synthetic construct
  source 1..20: mol_type = other DNA
catgtgacggcgagcagcgc

SEQ ID NO: 14989 - DNA, 21 bp, synthetic construct
  misc_feature 1..21: note = Synthetic construct
  source 1..21: mol_type = other DNA
aagaggttgccacgaggatac

SEQ ID NO: 14990 - DNA, 21 bp, synthetic construct
  misc_feature 1..21: note = Synthetic construct
  source 1..21: mol_type = other DNA
gtgggtcccattaaaattgga

SEQ ID NO: 14991 - DNA, 23 bp, synthetic construct
  misc_feature 1..23: note = Synthetic construct
  source 1..23: mol_type = other DNA
tatccctcttgctctggaagcag

SEQ ID NO: 14992 - DNA, 23 bp, synthetic construct
  misc_feature 1..23: note = Synthetic construct
  source 1..23: mol_type = other DNA
taggtcgacgtttgaaggtctgt

SEQ ID NO: 14993 - DNA, 23 bp, synthetic construct
  misc_feature 1..23: note = Synthetic construct
  source 1..23: mol_type = other DNA
atcccttgcctcacaaatgtcaa

SEQ ID NO: 14994 - DNA, 22 bp, synthetic construct
  misc_feature 1..22: note = Synthetic construct
  source 1..22: mol_type = other DNA
cggaaagagtaagcaacagctg

SEQ ID NO: 14995 - DNA, 21 bp, synthetic construct
  misc_feature 1..21: note = Synthetic construct
  source 1..21: mol_type = other DNA
aagtatagagctagcataggc

SEQ ID NO: 14996 - DNA, 21 bp, synthetic construct
  misc_feature 1..21: note = Synthetic construct
  source 1..21: mol_type = other DNA
cgctgcatagcactataccaa

SEQ ID NO: 14997 - DNA, 21 bp, synthetic construct
  misc_feature 1..21: note = Synthetic construct
  source 1..21: mol_type = other DNA
cttatacatggaggtctttcc

SEQ ID NO: 14998 - DNA, 22 bp, synthetic construct
  misc_feature 1..22: note = Synthetic construct
  source 1..22: mol_type = other DNA
tacagtccttgtcaatgactgc

SEQ ID NO: 14999 - DNA, 23 bp, synthetic construct
  misc_feature 1..23: note = Synthetic construct
  source 1..23: mol_type = other DNA
ttactcactataggtcccacgta

SEQ ID NO: 15000 - DNA, 21 bp, synthetic construct
  misc_feature 1..21: note = Synthetic construct
  source 1..21: mol_type = other DNA
gcgttcaagaagtcgcttttc

SEQ ID NO: 15001 - DNA, 20 bp, synthetic construct
  misc_feature 1..20: note = Synthetic construct
  source 1..20: mol_type = other DNA
gtgcaccggccgtccaccaa

SEQ ID NO: 15002 - DNA, 22 bp, synthetic construct
  misc_feature 1..22: note = Synthetic construct
  source 1..22: mol_type = other DNA
gcgattgccccagcgacttacc

SEQ ID NO: 15003 - DNA, 22 bp, synthetic construct
  misc_feature 1..22: note = Synthetic construct
  source 1..22: mol_type = other DNA
ctggaatccaagaccattactg

SEQ ID NO: 15004 - DNA, 21 bp, synthetic construct
  misc_feature 1..21: note = Synthetic construct
  source 1..21: mol_type = other DNA
agatgcccctgctataatata

SEQ ID NO: 15005 - DNA, 23 bp, synthetic construct
  misc_feature 1..23: note = Synthetic construct
  source 1..23: mol_type = other DNA
agcaacagctgaccgaggatgga

SEQ ID NO: 15006 - DNA, 22 bp, synthetic construct
  misc_feature 1..22: note = Synthetic construct
  source 1..22: mol_type = other DNA
caccacatctcgaaggacatcg

SEQ ID NO: 15007 - DNA, 21 bp, synthetic construct
  misc_feature 1..21: note = Synthetic construct
  source 1..21: mol_type = other DNA
cgtgaagcctcaccgattgcg

SEQ ID NO: 15008 - DNA, 22 bp, synthetic construct
  misc_feature 1..22: note = Synthetic construct
  source 1..22: mol_type = other DNA
tcgagacgcgtcttagcgttta

SEQ ID NO: 15009 - DNA, 23 bp, synthetic construct
  misc_feature 1..23: note = Synthetic construct
  source 1..23: mol_type = other DNA
ccacaacgaaatcgtctccggtc

SEQ ID NO: 15010 - DNA, 22 bp, synthetic construct
  misc_feature 1..22: note = Synthetic construct
  source 1..22: mol_type = other DNA
taggaacagtaccctaggccta

SEQ ID NO: 15011 - DNA, 23 bp, synthetic construct
  misc_feature 1..23: note = Synthetic construct
  source 1..23: mol_type = other DNA
cgagataaccaggctctggttac

SEQ ID NO: 15012 - DNA, 22 bp, synthetic construct
  misc_feature 1..22: note = Synthetic construct
  source 1..22: mol_type = other DNA
ctggaagcaggggaggcaagcg

SEQ ID NO: 15013 - DNA, 22 bp, synthetic construct
  misc_feature 1..22: note = Synthetic construct
  source 1..22: mol_type = other DNA
caatggtgattactcactatag

SEQ ID NO: 15014 - DNA, 22 bp, synthetic construct
  misc_feature 1..22: note = Synthetic construct
  source 1..22: mol_type = other DNA
cgtttgaggccgtagatgatta

SEQ ID NO: 15015 - DNA, 22 bp, synthetic construct
  misc_feature 1..22: note = Synthetic construct
  source 1..22: mol_type = other DNA
ccgagcaacatcccttgcctca

SEQ ID NO: 15016 - DNA, 20 bp, synthetic construct
  misc_feature 1..20: note = Synthetic construct
  source 1..20: mol_type = other DNA
gctttcgccaggccgaggtg

SEQ ID NO: 15017 - DNA, 21 bp, synthetic construct
  misc_feature 1..21: note = Synthetic construct
  source 1..21: mol_type = other DNA
tcttcaagttgagaaatacat

SEQ ID NO: 15018 - DNA, 22 bp, synthetic construct
  misc_feature 1..22: note = Synthetic construct
  source 1..22: mol_type = other DNA
caagaagtcgcttttcgtgctg

SEQ ID NO: 15019 - DNA, 21 bp, synthetic construct
  misc_feature 1..21: note = Synthetic construct
  source 1..21: mol_type = other DNA
ttgcttctagctttcaaagct

SEQ ID NO: 15020 - DNA, 23 bp, synthetic construct
  misc_feature 1..23: note = Synthetic construct
  source 1..23: mol_type = other DNA
tctccgtgaacggatgatgccaa

SEQ ID NO: 15021 - DNA, 23 bp, synthetic construct
  misc_feature 1..23: note = Synthetic construct
  source 1..23: mol_type = other DNA
atcggcgtaccgcaagcatgaat

SEQ ID NO: 15022 - DNA, 21 bp, synthetic construct
  misc_feature 1..21: note = Synthetic construct
  source 1..21: mol_type = other DNA
ccccacccacacgagctttct

SEQ ID NO: 15023 - DNA, 22 bp, synthetic construct
  misc_feature 1..22: note = Synthetic construct
  source 1..22: mol_type = other DNA
gacgattccgggtttagagtcg

SEQ ID NO: 15024 - DNA, 20 bp, synthetic construct
  misc_feature 1..20: note = Synthetic construct
  source 1..20: mol_type = other DNA
ggtcccattaaaattggaac

SEQ ID NO: 15025 - DNA, 22 bp, synthetic construct
  misc_feature 1..22: note = Synthetic construct
  source 1..22: mol_type = other DNA
agaggcataagtgccccccgca

SEQ ID NO: 15026 - DNA, 23 bp, synthetic construct
  misc_feature 1..23: note = Synthetic construct
  source 1..23: mol_type = other DNA
cacccatgccgagaggagggtcc

SEQ ID NO: 15027 - DNA, 23 bp, synthetic construct
  misc_feature 1..23: note = Synthetic construct
  source 1..23: mol_type = other DNA
agaagcattttgcaagcacaggc

SEQ ID NO: 15028 - DNA, 23 bp, synthetic construct
  misc_feature 1..23: note = Synthetic construct
  source 1..23: mol_type = other DNA
tacctagtcgagattgagcgcaa

SEQ ID NO: 15029 - DNA, 22 bp, synthetic construct
  misc_feature 1..22: note = Synthetic construct
  source 1..22: mol_type = other DNA
gcccgagaaagcgctctcgacg

SEQ ID NO: 15030 - DNA, 21 bp, synthetic construct
  misc_feature 1..21: note = Synthetic construct
  source 1..21: mol_type = other DNA
agaggagggtccacggaagct

SEQ ID NO: 15031 - DNA, 21 bp, synthetic construct
  misc_feature 1..21: note = Synthetic construct
  source 1..21: mol_type = other DNA
tgtttcattggacatcgcaag

SEQ ID NO: 15032 - DNA, 20 bp, synthetic construct
  misc_feature 1..20: note = Synthetic construct
  source 1..20: mol_type = other DNA
taccgctctgctatgctacc

SEQ ID NO: 15033 - DNA, 22 bp, synthetic construct
  misc_feature 1..22: note = Synthetic construct
  source 1..22: mol_type = other DNA
gcgatggtaccgatagcgacat

SEQ ID NO: 15034 - DNA, 22 bp, synthetic construct
  misc_feature 1..22: note = Synthetic construct
  source 1..22: mol_type = other DNA
cgccagtctatttatctcttcc

SEQ ID NO: 15035 - DNA, 20 bp, synthetic construct
  misc_feature 1..20: note = Synthetic construct
  source 1..20: mol_type = other DNA
gtaaggatcctccaaactgg

SEQ ID NO: 15036 - DNA, 21 bp, synthetic construct
  misc_feature 1..21: note = Synthetic construct
  source 1..21: mol_type = other DNA
gcttagaagcattttgcaagc

SEQ ID NO: 15037 - DNA, 20 bp, synthetic construct
  misc_feature 1..20: note = Synthetic construct
  source 1..20: mol_type = other DNA
ctcgaaggacatcggcgtac

SEQ ID NO: 15038 - DNA, 21 bp, synthetic construct
  misc_feature 1..21: note = Synthetic construct
  source 1..21: mol_type = other DNA
tccccatgttaggcataccgg

SEQ ID NO: 15039 - DNA, 21 bp, synthetic construct
  misc_feature 1..21: note = Synthetic construct
  source 1..21: mol_type = other DNA
ggcagaacgagcatagcgagc

SEQ ID NO: 15040 - DNA, 20 bp, synthetic construct
  misc_feature 1..20: note = Synthetic construct
  source 1..20: mol_type = other DNA
ctcggactatacttatacat

SEQ ID NO: 15041 - DNA, 23 bp, synthetic construct
  misc_feature 1..23: note = Synthetic construct
  source 1..23: mol_type = other DNA
ttgataaaaggtgttacccttta

SEQ ID NO: 15042 - DNA, 23 bp, synthetic construct
  misc_feature 1..23: note = Synthetic construct
  source 1..23: mol_type = other DNA
aggcataagtgccccccgcaatt

SEQ ID NO: 15043 - DNA, 22 bp, synthetic construct
  misc_feature 1..22: note = Synthetic construct
  source 1..22: mol_type = other DNA
cttattattttatctagcccga

SEQ ID NO: 15044 - DNA, 21 bp, synthetic construct
  misc_feature 1..21: note = Synthetic construct
  source 1..21: mol_type = other DNA
tccatagaacttgggtgatcc

SEQ ID NO: 15045 - DNA, 23 bp, synthetic construct
  misc_feature 1..23: note = Synthetic construct
  source 1..23: mol_type = other DNA
agctagttttgtgcaccggccgt

SEQ ID NO: 15046 - DNA, 21 bp, synthetic construct
  misc_feature 1..21: note = Synthetic construct
  source 1..21: mol_type = other DNA
tccgctgggcagcatggaatc

SEQ ID NO: 15047 - DNA, 20 bp, synthetic construct
  misc_feature 1..20: note = Synthetic construct
  source 1..20: mol_type = other DNA
ctgaccccggttttgctttg

SEQ ID NO: 15048 - DNA, 20 bp, synthetic construct
  misc_feature 1..20: note = Synthetic construct
  source 1..20: mol_type = other DNA
cctgacacctctctgtcccg

SEQ ID NO: 15049 - DNA, 22 bp, synthetic construct
  misc_feature 1..22: note = Synthetic construct
  source 1..22: mol_type = other DNA
atctaccggcagacagcatagg

SEQ ID NO: 15050 - DNA, 20 bp, synthetic construct
  misc_feature 1..20: note = Synthetic construct
  source 1..20: mol_type = other DNA
caaaatgtagttctttggac

SEQ ID NO: 15051 - DNA, 23 bp, synthetic construct
  misc_feature 1..23: note = Synthetic construct
  source 1..23: mol_type = other DNA
ttcaatctaccggcagacagcat

SEQ ID NO: 15052 - DNA, 23 bp, synthetic construct
  misc_feature 1..23: note = Synthetic construct
  source 1..23: mol_type = other DNA
catcgactggctccctgggggca

SEQ ID NO: 15053 - DNA, 22 bp, synthetic construct
  misc_feature 1..22: note = Synthetic construct
  source 1..22: mol_type = other DNA
gcgtgaaaatggcaccacagct

SEQ ID NO: 15054 - DNA, 20 bp, synthetic construct
  misc_feature 1..20: note = Synthetic construct
  source 1..20: mol_type = other DNA
ttgaaggacagctcgattac

SEQ ID NO: 15055 - DNA, 22 bp, synthetic construct
  misc_feature 1..22: note = Synthetic construct
  source 1..22: mol_type = other DNA
gtttcgtaggctggaatccaag

SEQ ID NO: 15056 - DNA, 22 bp, synthetic construct
  misc_feature 1..22: note = Synthetic construct
  source 1..22: mol_type = other DNA
ccattgcggccttggtatccgt

SEQ ID NO: 15057 - DNA, 23 bp, synthetic construct
  misc_feature 1..23: note = Synthetic construct
  source 1..23: mol_type = other DNA
ttgctacgtgcaaaccgtaccaa

SEQ ID NO: 15058 - DNA, 23 bp, synthetic construct
  misc_feature 1..23: note = Synthetic construct
  source 1..23: mol_type = other DNA
ctaatgggtacagcttctgttgt

SEQ ID NO: 15059 - DNA, 21 bp, synthetic construct
  misc_feature 1..21: note = Synthetic construct
  source 1..21: mol_type = other DNA
attgcggccttggtatccgta

SEQ ID NO: 15060 - DNA, 21 bp, synthetic construct
  misc_feature 1..21: note = Synthetic construct
  source 1..21: mol_type = other DNA
cttctattgagtaagagaaat

SEQ ID NO: 15061 - DNA, 23 bp, synthetic construct
  misc_feature 1..23: note = Synthetic construct
  source 1..23: mol_type = other DNA
tccttgtcaatgactgcattatt

SEQ ID NO: 15062 - DNA, 22 bp, synthetic construct
  misc_feature 1..22: note = Synthetic construct
  source 1..22: mol_type = other DNA
aactcgatctcaggtactataa

SEQ ID NO: 15063 - DNA, 23 bp, synthetic construct
  misc_feature 1..23: note = Synthetic construct
  source 1..23: mol_type = other DNA
cagccacgaaagtagtctgcggc

SEQ ID NO: 15064 - DNA, 22 bp, synthetic construct
  misc_feature 1..22: note = Synthetic construct
  source 1..22: mol_type = other DNA
tagcgccagtctatttatctct

SEQ ID NO: 15065 - DNA, 23 bp, synthetic construct
  misc_feature 1..23: note = Synthetic construct
  source 1..23: mol_type = other DNA
aatgtactgtttaggaacagtac

SEQ ID NO: 15066 - DNA, 22 bp, synthetic construct
  misc_feature 1..22: note = Synthetic construct
  source 1..22: mol_type = other DNA
gccagcaaaattgagctgaccc

SEQ ID NO: 15067 - DNA, 23 bp, synthetic construct
  misc_feature 1..23: note = Synthetic construct
  source 1..23: mol_type = other DNA
gtcaaggcttcttattattttat

SEQ ID NO: 15068 - DNA, 20 bp, synthetic construct
  misc_feature 1..20: note = Synthetic construct
  source 1..20: mol_type = other DNA
gatgccttagcatctaccgc

SEQ ID NO: 15069 - DNA, 23 bp, synthetic construct
  misc_feature 1..23: note = Synthetic construct
  source 1..23: mol_type = other DNA
agctggcttcaggacgttttcca

SEQ ID NO: 15070 - DNA, 22 bp, synthetic construct
  misc_feature 1..22: note = Synthetic construct
  source 1..22: mol_type = other DNA
gcttaacgagtgtttcgtaggc

SEQ ID NO: 15071 - DNA, 23 bp, synthetic construct
  misc_feature 1..23: note = Synthetic construct
  source 1..23: mol_type = other DNA
gttccacggatgttcgcttcacc

SEQ ID NO: 15072 - DNA, 22 bp, synthetic construct
  misc_feature 1..22: note = Synthetic construct
  source 1..22: mol_type = other DNA
ttgagctgaccccggttttgct

SEQ ID NO: 15073 - DNA, 22 bp, synthetic construct
  misc_feature 1..22: note = Synthetic construct
  source 1..22: mol_type = other DNA
agcgcaagtgtccgaatgtttc

SEQ ID NO: 15074 - DNA, 20 bp, synthetic construct
  misc_feature 1..20: note = Synthetic construct
  source 1..20: mol_type = other DNA
cttttccacggaaagagtaa

SEQ ID NO: 15075 - DNA, 21 bp, synthetic construct
  misc_feature 1..21: note = Synthetic construct
  source 1..21: mol_type = other DNA
gatataagtatagagctagca

SEQ ID NO: 15076 - DNA, 20 bp, synthetic construct
  misc_feature 1..20: note = Synthetic construct
  source 1..20: mol_type = other DNA
gactggctccctgggggcat

SEQ ID NO: 15077 - DNA, 21 bp, synthetic construct
  misc_feature 1..21: note = Synthetic construct
  source 1..21: mol_type = other DNA
ggccggtaagtttgtactcct

SEQ ID NO: 15078 - DNA, 22 bp, synthetic construct
  misc_feature 1..22: note = Synthetic construct
  source 1..22: mol_type = other DNA
agggtgtaagggagtcctcaca

SEQ ID NO: 15079 - DNA, 23 bp, synthetic construct
  misc_feature 1..23: note = Synthetic construct
  source 1..23: mol_type = other DNA
tggcaccacagctacagtttggc

SEQ ID NO: 15080 - DNA, 20 bp, synthetic construct
  misc_feature 1..20: note = Synthetic construct
  source 1..20: mol_type = other DNA
attaaaattggaaccacaac

SEQ ID NO: 15081 - DNA, 22 bp, synthetic construct
  misc_feature 1..22: note = Synthetic construct
  source 1..22: mol_type = other DNA
aaagagtaagcaacagctgacc

SEQ ID NO: 15082 - DNA, 23 bp, synthetic construct
  misc_feature 1..23: note = Synthetic construct
  source 1..23: mol_type = other DNA
acgtcctacgtcgcggaatgttc

SEQ ID NO: 15083 - DNA, 21 bp, synthetic construct
  misc_feature 1..21: note = Synthetic construct
  source 1..21: mol_type = other DNA
taggtgcggagatattccaca

SEQ ID NO: 15084 - DNA, 23 bp, synthetic construct
  misc_feature 1..23: note = Synthetic construct
  source 1..23: mol_type = other DNA
gacattcctcggactatacttat

SEQ ID NO: 15085 - DNA, 22 bp, synthetic construct
  misc_feature 1..22: note = Synthetic construct
  source 1..22: mol_type = other DNA
gtcgcagaccgagtcgtcccgt

SEQ ID NO: 15086 - DNA, 20 bp, synthetic construct
  misc_feature 1..20: note = Synthetic construct
  source 1..20: mol_type = other DNA
cttggtatccgtagatgccc

SEQ ID NO: 15087 - DNA, 23 bp, synthetic construct
  misc_feature 1..23: note = Synthetic construct
  source 1..23: mol_type = other DNA
tgccgtcagagccatatgtggtt

SEQ ID NO: 15088 - DNA, 22 bp, synthetic construct
  misc_feature 1..22: note = Synthetic construct
  source 1..22: mol_type = other DNA
ggacttactagttagctagttg

SEQ ID NO: 15089 - DNA, 22 bp, synthetic construct
  misc_feature 1..22: note = Synthetic construct
  source 1..22: mol_type = other DNA
actcactataggtcccacgtat

SEQ ID NO: 15090 - DNA, 22 bp, synthetic construct
  misc_feature 1..22: note = Synthetic construct
  source 1..22: mol_type = other DNA
aagtggaagttctcaaagaagg

SEQ ID NO: 15091 - DNA, 23 bp, synthetic construct
  misc_feature 1..23: note = Synthetic construct
  source 1..23: mol_type = other DNA
ttgaactgaatgtagcttcacgg

SEQ ID NO: 15092 - DNA, 20 bp, synthetic construct
  misc_feature 1..20: note = Synthetic construct
  source 1..20: mol_type = other DNA
cccctcaacagcctccatac

SEQ ID NO: 15093 - DNA, 20 bp, synthetic construct
  misc_feature 1..20: note = Synthetic construct
  source 1..20: mol_type = other DNA
gtgcaaaccgtaccaacagc

SEQ ID NO: 15094 - DNA, 22 bp, synthetic construct
  misc_feature 1..22: note = Synthetic construct
  source 1..22: mol_type = other DNA
gcaaaatgtagttctttggaca

SEQ ID NO: 15095 - DNA, 21 bp, synthetic construct
  misc_feature 1..21: note = Synthetic construct
  source 1..21: mol_type = other DNA
atgttcgcttcacccagtagc

SEQ ID NO: 15096 - DNA, 22 bp, synthetic construct
  misc_feature 1..22: note = Synthetic construct
  source 1..22: mol_type = other DNA
ctctggaagcaggggaggcaag

SEQ ID NO: 15097 - DNA, 23 bp, synthetic construct
  misc_feature 1..23: note = Synthetic construct
  source 1..23: mol_type = other DNA
gcgctagaaagagagctttaaat

SEQ ID NO: 15098 - DNA, 21 bp, synthetic construct
  misc_feature 1..21: note = Synthetic construct
  source 1..21: mol_type = other DNA
tgacttctattgagtaagaga

SEQ ID NO: 15099 - DNA, 20 bp, synthetic construct
  misc_feature 1..20: note = Synthetic construct
  source 1..20: mol_type = other DNA
atagcgattcgatgccctcc

SEQ ID NO: 15100 - DNA, 22 bp, synthetic construct
  misc_feature 1..22: note = Synthetic construct
  source 1..22: mol_type = other DNA
agagctagcataggcgagtgtg

SEQ ID NO: 15101 - DNA, 22 bp, synthetic construct
  misc_feature 1..22: note = Synthetic construct
  source 1..22: mol_type = other DNA
cgcaagtgtccgaatgtttcat

SEQ ID NO: 15102 - DNA, 20 bp, synthetic construct
  misc_feature 1..20: note = Synthetic construct
  source 1..20: mol_type = other DNA
tagccgatgccccaacccct

SEQ ID NO: 15103 - DNA, 21 bp, synthetic construct
  misc_feature 1..21: note = Synthetic construct
  source 1..21: mol_type = other DNA
gattatctgcggccggtaagt

SEQ ID NO: 15104 - DNA, 22 bp, synthetic construct
  misc_feature 1..22: note = Synthetic construct
  source 1..22: mol_type = other DNA
gggtgtaagggagtcctcacac

SEQ ID NO: 15105 - DNA, 20 bp, synthetic construct
  misc_feature 1..20: note = Synthetic construct
  source 1..20: mol_type = other DNA
accgaggatggacatccatt

SEQ ID NO: 15106 - DNA, 20 bp, synthetic construct
  misc_feature 1..20: note = Synthetic construct
  source 1..20: mol_type = other DNA
cgttggcaatggggggcgcg

SEQ ID NO: 15107 - DNA, 20 bp, synthetic construct
  misc_feature 1..20: note = Synthetic construct
  source 1..20: mol_type = other DNA
gccgaggtggctttccaccc

SEQ ID NO: 15108 - DNA, 22 bp, synthetic construct
  misc_feature 1..22: note = Synthetic construct
  source 1..22: mol_type = other DNA
ccaccacatctcgaaggacatc

SEQ ID NO: 15109 - DNA, 23 bp, synthetic construct
  misc_feature 1..23: note = Synthetic construct
  source 1..23: mol_type = other DNA
gttagttaacgaagacagcgatg

SEQ ID NO: 15110 - DNA, 20 bp, synthetic construct
  misc_feature 1..20: note = Synthetic construct
  source 1..20: mol_type = other DNA
gcaccctacgaggatgtaca

SEQ ID NO: 15111 - DNA, 22 bp, synthetic construct
  misc_feature 1..22: note = Synthetic construct
  source 1..22: mol_type = other DNA
tcccggaatgccgggggcaccc

SEQ ID NO: 15112 - DNA, 23 bp, synthetic construct
  misc_feature 1..23: note = Synthetic construct
  source 1..23: mol_type = other DNA
tactagttagctagttggtcgca

SEQ ID NO: 15113 - DNA, 21 bp, synthetic construct
  misc_feature 1..21: note = Synthetic construct
  source 1..21: mol_type = other DNA
aagcagtctcgagacgcgtct

SEQ ID NO: 15114 - DNA, 23 bp, synthetic construct
  misc_feature 1..23: note = Synthetic construct
  source 1..23: mol_type = other DNA
ttaggtaaaaccattgcggcctt

SEQ ID NO: 15115 - DNA, 21 bp, synthetic construct
  misc_feature 1..21: note = Synthetic construct
  source 1..21: mol_type = other DNA
cggtcgctcgagaggagccat

SEQ ID NO: 15116 - DNA, 20 bp, synthetic construct
  misc_feature 1..20: note = Synthetic construct
  source 1..20: mol_type = other DNA
ccggccgtccaccaacctca

SEQ ID NO: 15117 - DNA, 20 bp, synthetic construct
  misc_feature 1..20: note = Synthetic construct
  source 1..20: mol_type = other DNA
gttcaagaagtcgcttttcg

SEQ ID NO: 15118 - DNA, 22 bp, synthetic construct
  misc_feature 1..22: note = Synthetic construct
  source 1..22: mol_type = other DNA
agggccagcaaaattgagctga

SEQ ID NO: 15119 - DNA, 21 bp, synthetic construct
  misc_feature 1..21: note = Synthetic construct
  source 1..21: mol_type = other DNA
tttagtggctgtcgtacttca

SEQ ID NO: 15120 - DNA, 22 bp, synthetic construct
  misc_feature 1..22: note = Synthetic construct
  source 1..22: mol_type = other DNA
cgagctcccggaatgccggggg

SEQ ID NO: 15121 - DNA, 20 bp, synthetic construct
  misc_feature 1..20: note = Synthetic construct
  source 1..20: mol_type = other DNA
accaaaatgtatttgctacg

SEQ ID NO: 15122 - DNA, 21 bp, synthetic construct
  misc_feature 1..21: note = Synthetic construct
  source 1..21: mol_type = other DNA
ttatacatggaggtctttccc

SEQ ID NO: 15123 - DNA, 21 bp, synthetic construct
  misc_feature 1..21: note = Synthetic construct
  source 1..21: mol_type = other DNA
cgttgaagcgattgccccagc

SEQ ID NO: 15124 - DNA, 21 bp, synthetic construct
  misc_feature 1..21: note = Synthetic construct
  source 1..21: mol_type = other DNA
aggggaggcaagcgcaaatgc

SEQ ID NO: 15125 - DNA, 22 bp, synthetic construct
  misc_feature 1..22: note = Synthetic construct
  source 1..22: mol_type = other DNA
ccctggagggggatttctctcc

SEQ ID NO: 15126 - DNA, 22 bp, synthetic construct
  misc_feature 1..22: note = Synthetic construct
  source 1..22: mol_type = other DNA
agaggagggtccacggaagcta

SEQ ID NO: 15127 - DNA, 21 bp, synthetic construct
  misc_feature 1..21: note = Synthetic construct
  source 1..21: mol_type = other DNA
cagtccagccatgattgtagt

SEQ ID NO: 15128 - DNA, 22 bp, synthetic construct
  misc_feature 1..22: note = Synthetic construct
  source 1..22: mol_type = other DNA
gttttgctttgtcaccgtgatg

SEQ ID NO: 15129 - DNA, 20 bp, synthetic construct
  misc_feature 1..20: note = Synthetic construct
  source 1..20: mol_type = other DNA
agtgtttcgtaggctggaat

SEQ ID NO: 15130 - DNA, 20 bp, synthetic construct
  misc_feature 1..20: note = Synthetic construct
  source 1..20: mol_type = other DNA
ccgtgatggggagaggcata

SEQ ID NO: 15131 - DNA, 22 bp, synthetic construct
  misc_feature 1..22: note = Synthetic construct
  source 1..22: mol_type = other DNA
ggttaaaagcgatgcttaaggc

SEQ ID NO: 15132 - DNA, 22 bp, synthetic construct
  misc_feature 1..22: note = Synthetic construct
  source 1..22: mol_type = other DNA
cttactagttagctagttggtc

SEQ ID NO: 15133 - DNA, 20 bp, synthetic construct
  misc_feature 1..20: note = Synthetic construct
  source 1..20: mol_type = other DNA
actagttagctagttggtcg

SEQ ID NO: 15134 - DNA, 20 bp, synthetic construct
  misc_feature 1..20: note = Synthetic construct
  source 1..20: mol_type = other DNA
agagggagctgcgtgcgagg

SEQ ID NO: 15135 - DNA, 23 bp, synthetic construct
  misc_feature 1..23: note = Synthetic construct
  source 1..23: mol_type = other DNA
gcttccaagtggaagttctcaaa

SEQ ID NO: 15136 - DNA, 22 bp, synthetic construct
  misc_feature 1..22: note = Synthetic construct
  source 1..22: mol_type = other DNA
cgaatgcttccaagtggaagtt

SEQ ID NO: 15137 - DNA, 21 bp, synthetic construct
  misc_feature 1..21: note = Synthetic construct
  source 1..21: mol_type = other DNA
ggacatcgcaagcagtctcga

SEQ ID NO: 15138 - DNA, 23 bp, synthetic construct
  misc_feature 1..23: note = Synthetic construct
  source 1..23: mol_type = other DNA
atcatgggaactatccctcttgc

SEQ ID NO: 15139 - DNA, 21 bp, synthetic construct
  misc_feature 1..21: note = Synthetic construct
  source 1..21: mol_type = other DNA
cctctctgtcccgtgacgatt

SEQ ID NO: 15140 - DNA, 22 bp, synthetic construct
  misc_feature 1..22: note = Synthetic construct
  source 1..22: mol_type = other DNA
acgagctcccggaatgccgggg

SEQ ID NO: 15141 - DNA, 22 bp, synthetic construct
  misc_feature 1..22: note = Synthetic construct
  source 1..22: mol_type = other DNA
cgtgaagcctcaccgattgcgg

SEQ ID NO: 15142 - DNA, 20 bp, synthetic construct
  misc_feature 1..20: note = Synthetic construct
  source 1..20: mol_type = other DNA
agctttcaaagctagttttg

SEQ ID NO: 15143 - DNA, 21 bp, synthetic construct
  misc_feature 1..21: note = Synthetic construct
  source 1..21: mol_type = other DNA
tatccctcttgctctggaagc

SEQ ID NO: 15144 - DNA, 23 bp, synthetic construct
  misc_feature 1..23: note = Synthetic construct
  source 1..23: mol_type = other DNA
cggccgcacgcgcaatatgcgtg

SEQ ID NO: 15145 - DNA, 21 bp, synthetic construct
  misc_feature 1..21: note = Synthetic construct
  source 1..21: mol_type = other DNA
gtaattagtccgttgccgaga

SEQ ID NO: 15146 - DNA, 22 bp, synthetic construct
  misc_feature 1..22: note = Synthetic construct
  source 1..22: mol_type = other DNA
gcgtgaagcctcaccgattgcg

SEQ ID NO: 15147 - DNA, 21 bp, synthetic construct
  misc_feature 1..21: note = Synthetic construct
  source 1..21: mol_type = other DNA
tccgtgaacggatgatgccaa

SEQ ID NO: 15148 - DNA, 22 bp, synthetic construct
  misc_feature 1..22: note = Synthetic construct
  source 1..22: mol_type = other DNA
ctagcagcaacaaacccgttac

SEQ ID NO: 15149 - DNA, 20 bp, synthetic construct
  misc_feature 1..20: note = Synthetic construct
  source 1..20: mol_type = other DNA
gcgcctgccactctgacttc

SEQ ID NO: 15150 - DNA, 20 bp, synthetic construct
  misc_feature 1..20: note = Synthetic construct
  source 1..20: mol_type = other DNA
gtcgcatctaccaagcgaac

SEQ ID NO: 15151 - DNA, 21 bp, synthetic construct
  misc_feature 1..21: note = Synthetic construct
  source 1..21: mol_type = other DNA
aaactcgatctcaggtactat

SEQ ID NO: 15152 - DNA, 22 bp, synthetic construct
  misc_feature 1..22: note = Synthetic construct
  source 1..22: mol_type = other DNA
ccagtagcaccccagcgggcat

SEQ ID NO: 15153 - DNA, 20 bp, synthetic construct
  misc_feature 1..20: note = Synthetic construct
  source 1..20: mol_type = other DNA
tccactttagtggctgtcgt

SEQ ID NO: 15154 - DNA, 20 bp, synthetic construct
  misc_feature 1..20: note = Synthetic construct
  source 1..20: mol_type = other DNA
gcagaacgagcatagcgagc

SEQ ID NO: 15155 - DNA, 23 bp, synthetic construct
  misc_feature 1..23: note = Synthetic construct
  source 1..23: mol_type = other DNA
cacacccttttccacggaaagag

SEQ ID NO: 15156 - DNA, 20 bp, synthetic construct
  misc_feature 1..20: note = Synthetic construct
  source 1..20: mol_type = other DNA
gatggtaccgatagcgacat

SEQ ID NO: 15157 - DNA, 21 bp, synthetic construct
  misc_feature 1..21: note = Synthetic construct
  source 1..21: mol_type = other DNA
gggcagcatggaatcgatagc

SEQ ID NO: 15158 - DNA, 22 bp, synthetic construct
  misc_feature 1..22: note = Synthetic construct
  source 1..22: mol_type = other DNA
gaggttgccacgaggatacccc

SEQ ID NO: 15159 - DNA, 22 bp, synthetic construct
  misc_feature 1..22: note = Synthetic construct
  source 1..22: mol_type = other DNA
ccctcttgctctggaagcaggg

SEQ ID NO: 15160 - DNA, 23 bp, synthetic construct
  misc_feature 1..23: note = Synthetic construct
  source 1..23: mol_type = other DNA
caccaacctcaacgtcaagccaa

SEQ ID NO: 15161 - DNA, 21 bp, synthetic construct
  misc_feature 1..21: note = Synthetic construct
  source 1..21: mol_type = other DNA
caccgattgcggccaagggtg

SEQ ID NO: 15162 - DNA, 20 bp, synthetic construct
  misc_feature 1..20: note = Synthetic construct
  source 1..20: mol_type = other DNA
ctgatgatgcatcagtcggg

SEQ ID NO: 15163 - DNA, 22 bp, synthetic construct
  misc_feature 1..22: note = Synthetic construct
  source 1..22: mol_type = other DNA
agacccgttatcagtttcgctg

SEQ ID NO: 15164 - DNA, 23 bp, synthetic construct
  misc_feature 1..23: note = Synthetic construct
  source 1..23: mol_type = other DNA
taagtatagagctagcataggcg

SEQ ID NO: 15165 - DNA, 21 bp, synthetic construct
  misc_feature 1..21: note = Synthetic construct
  source 1..21: mol_type = other DNA
gttgaaggacagctcgattac

SEQ ID NO: 15166 - DNA, 21 bp, synthetic construct
  misc_feature 1..21: note = Synthetic construct
  source 1..21: mol_type = other DNA
caggtatggaatctacgcaat

SEQ ID NO: 15167 - DNA, 20 bp, synthetic construct
  misc_feature 1..20: note = Synthetic construct
  source 1..20: mol_type = other DNA
tcaccgtgatggggagaggc

SEQ ID NO: 15168 - DNA, 23 bp, synthetic construct
  misc_feature 1..23: note = Synthetic construct
  source 1..23: mol_type = other DNA
ggctgtcgtacttcaggcggccg

SEQ ID NO: 15169 - DNA, 23 bp, synthetic construct
  misc_feature 1..23: note = Synthetic construct
  source 1..23: mol_type = other DNA
tgcaaaccgtaccaacagcagag

SEQ ID NO: 15170 - DNA, 23 bp, synthetic construct
  misc_feature 1..23: note = Synthetic construct
  source 1..23: mol_type = other DNA
gattgaaatgagtcaagcaagag

SEQ ID NO: 15171 - DNA, 20 bp, synthetic construct
  misc_feature 1..20: note = Synthetic construct
  source 1..20: mol_type = other DNA
gtaccgatagcgacatccat

SEQ ID NO: 15172 - DNA, 23 bp, synthetic construct
  misc_feature 1..23: note = Synthetic construct
  source 1..23: mol_type = other DNA
acgctcgaaaatcatgggaacta

SEQ ID NO: 15173 - DNA, 20 bp, synthetic construct
  misc_feature 1..20: note = Synthetic construct
  source 1..20: mol_type = other DNA
agcggggttcgttgaagcga

SEQ ID NO: 15174 - DNA, 20 bp, synthetic construct
  misc_feature 1..20: note = Synthetic construct
  source 1..20: mol_type = other DNA
accagcgatgtatcgcacca

SEQ ID NO: 15175 - DNA, 23 bp, synthetic construct
  misc_feature 1..23: note = Synthetic construct
  source 1..23: mol_type = other DNA
ggggcacacgatctccgtgaacg

SEQ ID NO: 15176 - DNA, 21 bp, synthetic construct
  misc_feature 1..21: note = Synthetic construct
  source 1..21: mol_type = other DNA
aatgggtacagcttctgttgt

SEQ ID NO: 15177 - DNA, 22 bp, synthetic construct
  misc_feature 1..22: note = Synthetic construct
  source 1..22: mol_type = other DNA
cgctgctatctgaatagcagac

SEQ ID NO: 15178 - DNA, 23 bp, synthetic construct
  misc_feature 1..23: note = Synthetic construct
  source 1..23: mol_type = other DNA
agagaaattttatagcaagcttg

SEQ ID NO: 15179 - DNA, 23 bp, synthetic construct
  misc_feature 1..23: note = Synthetic construct
  source 1..23: mol_type = other DNA
agttctcaaagaaggatactctc

SEQ ID NO: 15180 - DNA, 20 bp, synthetic construct
  misc_feature 1..20: note = Synthetic construct
  source 1..20: mol_type = other DNA
ggaacagtaccctaggccta

SEQ ID NO: 15181 - DNA, 22 bp, synthetic construct
  misc_feature 1..22: note = Synthetic construct
  source 1..22: mol_type = other DNA
cgtttgaaggtctgttgcacgt

SEQ ID NO: 15182 - DNA, 22 bp, synthetic construct
  misc_feature 1..22: note = Synthetic construct
  source 1..22: mol_type = other DNA
gacgagttgaaggacagctcga

SEQ ID NO: 15183 - DNA, 23 bp, synthetic construct
  misc_feature 1..23: note = Synthetic construct
  source 1..23: mol_type = other DNA
gatgattatctgcggccggtaag

SEQ ID NO: 15184 - DNA, 23 bp, synthetic construct
  misc_feature 1..23: note = Synthetic construct
  source 1..23: mol_type = other DNA
acgttgtatagcgctgcatagca

SEQ ID NO: 15185 - DNA, 21 bp, synthetic construct
  misc_feature 1..21: note = Synthetic construct
  source 1..21: mol_type = other DNA
agcgtttatgtggtagtttca

SEQ ID NO: 15186 - DNA, 20 bp, synthetic construct
  misc_feature 1..20: note = Synthetic construct
  source 1..20: mol_type = other DNA
agaagtcgcttttcgtgctg

SEQ ID NO: 15187 - DNA, 20 bp, synthetic construct
  misc_feature 1..20: note = Synthetic construct
  source 1..20: mol_type = other DNA
gagcgctagaaagagagctt

SEQ ID NO: 15188 - DNA, 21 bp, synthetic construct
  misc_feature 1..21: note = Synthetic construct
  source 1..21: mol_type = other DNA
tcaatctaccggcagacagca

SEQ ID NO: 15189 - DNA, 21 bp, synthetic construct
  misc_feature 1..21: note = Synthetic construct
  source 1..21: mol_type = other DNA
aggtgttaccctttacccaag

SEQ ID NO: 15190 - DNA, 20 bp, synthetic construct
  misc_feature 1..20: note = Synthetic construct
  source 1..20: mol_type = other DNA
cggaccacacctcaaaagag

SEQ ID NO: 15191 - DNA, 22 bp, synthetic construct
  misc_feature 1..22: note = Synthetic construct
  source 1..22: mol_type = other DNA
atagcgattcgatgccctccgc

SEQ ID NO: 15192 - DNA, 23 bp, synthetic construct
  misc_feature 1..23: note = Synthetic construct
  source 1..23: mol_type = other DNA
ccgtaccaacagcagagatccat

SEQ ID NO: 15193 - DNA, 20 bp, synthetic construct
  misc_feature 1..20: note = Synthetic construct
  source 1..20: mol_type = other DNA
gagtcgttagcgtcgtttga

SEQ ID NO: 15194 - DNA, 23 bp, synthetic construct
  misc_feature 1..23: note = Synthetic construct
  source 1..23: mol_type = other DNA
tcgcatctaccaagcgaacgctg

SEQ ID NO: 15195 - DNA, 22 bp, synthetic construct
  misc_feature 1..22: note = Synthetic construct
  source 1..22: mol_type = other DNA
aaaatttggcttagaagcattt

SEQ ID NO: 15196 - DNA, 23 bp, synthetic construct
  misc_feature 1..23: note = Synthetic construct
  source 1..23: mol_type = other DNA
cgcaagtgtccgaatgtttcatt

SEQ ID NO: 15197 - DNA, 22 bp, synthetic construct
  misc_feature 1..22: note = Synthetic construct
  source 1..22: mol_type = other DNA
gagtgttgagcgctgcgtttgg

SEQ ID NO: 15198 - DNA, 23 bp, synthetic construct
  misc_feature 1..23: note = Synthetic construct
  source 1..23: mol_type = other DNA
aagccaaccaatggtgattactc

SEQ ID NO: 15199 - DNA, 20 bp, synthetic construct
  misc_feature 1..20: note = Synthetic construct
  source 1..20: mol_type = other DNA
aaaccattgatcgacgaacc

SEQ ID NO: 15200 - DNA, 22 bp, synthetic construct
  misc_feature 1..22: note = Synthetic construct
  source 1..22: mol_type = other DNA
tacctagtcgagattgagcgca

SEQ ID NO: 15201 - DNA, 22 bp, synthetic construct
  misc_feature 1..22: note = Synthetic construct
  source 1..22: mol_type = other DNA
ccacggaagctacaagaagcca

SEQ ID NO: 15202 - DNA, 21 bp, synthetic construct
  misc_feature 1..21: note = Synthetic construct
  source 1..21: mol_type = other DNA
gcaccacagctacagtttggc

SEQ ID NO: 15203 - DNA, 22 bp, synthetic construct
  misc_feature 1..22: note = Synthetic construct
  source 1..22: mol_type = other DNA
tatacagggtcactctaacgtg

SEQ ID NO: 15204 - DNA, 21 bp, synthetic construct
  misc_feature 1..21: note = Synthetic construct
  source 1..21: mol_type = other DNA
tctggacttactagttagcta

SEQ ID NO: 15205 - DNA, 22 bp, synthetic construct
  misc_feature 1..22: note = Synthetic construct
  source 1..22: mol_type = other DNA
tctattgagtaagagaaatttt

SEQ ID NO: 15206 - DNA, 22 bp, synthetic construct
  misc_feature 1..22: note = Synthetic construct
  source 1..22: mol_type = other DNA
taccaacagcagagatccatag

SEQ ID NO: 15207 - DNA, 22 bp, synthetic construct
  misc_feature 1..22: note = Synthetic construct
  source 1..22: mol_type = other DNA
cctcttgctctggaagcagggg

SEQ ID NO: 15208 - DNA, 23 bp, synthetic construct
  misc_feature 1..23: note = Synthetic construct
  source 1..23: mol_type = other DNA
ctcaaagaaggatactctcggca

SEQ ID NO: 15209 - DNA, 23 bp, synthetic construct
  misc_feature 1..23: note = Synthetic construct
  source 1..23: mol_type = other DNA
cgcctgccactctgacttctatt

SEQ ID NO: 15210 - DNA, 23 bp, synthetic construct
  misc_feature 1..23: note = Synthetic construct
  source 1..23: mol_type = other DNA
tgggctaagggagtcgttagcgt

SEQ ID NO: 15211 - DNA, 21 bp, synthetic construct
  misc_feature 1..21: note = Synthetic construct
  source 1..21: mol_type = other DNA
tctgctatgctacccttgata

SEQ ID NO: 15212 - DNA, 20 bp, synthetic construct
  misc_feature 1..20: note = Synthetic construct
  source 1..20: mol_type = other DNA
cagagccatatgtggttctg

SEQ ID NO: 15213 - DNA, 22 bp, synthetic construct
  misc_feature 1..22: note = Synthetic construct
  source 1..22: mol_type = other DNA
tagaaggagcgctagaaagaga

SEQ ID NO: 15214 - DNA, 21 bp, synthetic construct
  misc_feature 1..21: note = Synthetic construct
  source 1..21: mol_type = other DNA
agtttggcaaaatgtagttct

SEQ ID NO: 15215 - DNA, 22 bp, synthetic construct
  misc_feature 1..22: note = Synthetic construct
  source 1..22: mol_type = other DNA
agtttgtactcctaatgggtac

SEQ ID NO: 15216 - DNA, 23 bp, synthetic construct
  misc_feature 1..23: note = Synthetic construct
  source 1..23: mol_type = other DNA
taccctttacccaagtgtaaact

SEQ ID NO: 15217 - DNA, 23 bp, synthetic construct
  misc_feature 1..23: note = Synthetic construct
  source 1..23: mol_type = other DNA
cgagactctcgccgagataacca

SEQ ID NO: 15218 - DNA, 20 bp, synthetic construct
  misc_feature 1..20: note = Synthetic construct
  source 1..20: mol_type = other DNA
ggtcgcagaccgagtcgtcc

SEQ ID NO: 15219 - DNA, 23 bp, synthetic construct
  misc_feature 1..23: note = Synthetic construct
  source 1..23: mol_type = other DNA
tagcggaccacacctcaaaagag

SEQ ID NO: 15220 - DNA, 20 bp, synthetic construct
  misc_feature 1..20: note = Synthetic construct
  source 1..20: mol_type = other DNA
tcttcaagcgacttgttcgt

SEQ ID NO: 15221 - DNA, 22 bp, synthetic construct
  misc_feature 1..22: note = Synthetic construct
  source 1..22: mol_type = other DNA
ctcaacgtcaagccaaccaatg

SEQ ID NO: 15222 - DNA, 22 bp, synthetic construct
  misc_feature 1..22: note = Synthetic construct
  source 1..22: mol_type = other DNA
agatattccacacccatgccga

SEQ ID NO: 15223 - DNA, 21 bp, synthetic construct
  misc_feature 1..21: note = Synthetic construct
  source 1..21: mol_type = other DNA
aaagccgaagagggagctgcg

SEQ ID NO: 15224 - DNA, 23 bp, synthetic construct
  misc_feature 1..23: note = Synthetic construct
  source 1..23: mol_type = other DNA
aattggaaccacaacgaaatcgt

SEQ ID NO: 15225 - DNA, 23 bp, synthetic construct
  misc_feature 1..23: note = Synthetic construct
  source 1..23: mol_type = other DNA
ttccacggatgttcgcttcaccc

SEQ ID NO: 15226 - DNA, 20 bp, synthetic construct
  misc_feature 1..20: note = Synthetic construct
  source 1..20: mol_type = other DNA
ccgacgagcgcctatgggca

SEQ ID NO: 15227 - DNA, 22 bp, synthetic construct
  misc_feature 1..22: note = Synthetic construct
  source 1..22: mol_type = other DNA
agaagggacattcggttttgaa

SEQ ID NO: 15228 - DNA, 23 bp, synthetic construct
  misc_feature 1..23: note = Synthetic construct
  source 1..23: mol_type = other DNA
tacagaaatcgctctgcgatggt

SEQ ID NO: 15229 - DNA, 20 bp, synthetic construct
  misc_feature 1..20: note = Synthetic construct
  source 1..20: mol_type = other DNA
cgagtttaggcaaccatatc

SEQ ID NO: 15230 - DNA, 20 bp, synthetic construct
  misc_feature 1..20: note = Synthetic construct
  source 1..20: mol_type = other DNA
ttcacccagtagcaccccag

SEQ ID NO: 15231 - DNA, 21 bp, synthetic construct
  misc_feature 1..21: note = Synthetic construct
  source 1..21: mol_type = other DNA
ctacctttgggctaagggagt

SEQ ID NO: 15232 - DNA, 23 bp, synthetic construct
  misc_feature 1..23: note = Synthetic construct
  source 1..23: mol_type = other DNA
aaggtccctgggccgaagcccgc

SEQ ID NO: 15233 - DNA, 23 bp, synthetic construct
  misc_feature 1..23: note = Synthetic construct
  source 1..23: mol_type = other DNA
caggtccctgggccgaagcccgc

SEQ ID NO: 15234 - DNA, 23 bp, synthetic construct
  misc_feature 1..23: note = Synthetic construct
  source 1..23: mol_type = other DNA
taggtccctgggccgaagcccgc

SEQ ID NO: 15235 - DNA, 23 bp, synthetic construct
  misc_feature 1..23: note = Synthetic construct
  source 1..23: mol_type = other DNA
gcggtccctgggccgaagcccgc

SEQ ID NO: 15236 - DNA, 23 bp, synthetic construct
  misc_feature 1..23: note = Synthetic construct
  source 1..23: mol_type = other DNA
ggggtccctgggccgaagcccgc

SEQ ID NO: 15237 - DNA, 23 bp, synthetic construct
  misc_feature 1..23: note = Synthetic construct
  source 1..23: mol_type = other DNA
gtggtccctgggccgaagcccgc

SEQ ID NO: 15238 - DNA, 23 bp, synthetic construct
  misc_feature 1..23: note = Synthetic construct
  source 1..23: mol_type = other DNA
gaagtccctgggccgaagcccgc

SEQ ID NO: 15239 - DNA, 23 bp, synthetic construct
  misc_feature 1..23: note = Synthetic construct
  source 1..23: mol_type = other DNA
gacgtccctgggccgaagcccgc

SEQ ID NO: 15240 - DNA, 23 bp, synthetic construct
  misc_feature 1..23: note = Synthetic construct
  source 1..23: mol_type = other DNA
gatgtccctgggccgaagcccgc

SEQ ID NO: 15241 - DNA, 23 bp, synthetic construct
  misc_feature 1..23: note = Synthetic construct
  source 1..23: mol_type = other DNA
gagatccctgggccgaagcccgc

SEQ ID NO: 15242 - DNA, 23 bp, synthetic construct
  misc_feature 1..23: note = Synthetic construct
  source 1..23: mol_type = other DNA
gagctccctgggccgaagcccgc

SEQ ID NO: 15243 - DNA, 23 bp, synthetic construct
  misc_feature 1..23: note = Synthetic construct
  source 1..23: mol_type = other DNA
gagttccctgggccgaagcccgc

SEQ ID NO: 15244 - DNA, 23 bp, synthetic construct
  misc_feature 1..23: note = Synthetic construct
  source 1..23: mol_type = other DNA
gaggaccctgggccgaagcccgc

SEQ ID NO: 15245 - DNA, 23 bp, synthetic construct
  misc_feature 1..23: note = Synthetic construct
  source 1..23: mol_type = other DNA
gaggcccctgggccgaagcccgc

SEQ ID NO: 15246 - DNA, 23 bp, synthetic construct
  misc_feature 1..23: note = Synthetic construct
  source 1..23: mol_type = other DNA
gagggccctgggccgaagcccgc

SEQ ID NO: 15247 - DNA, 23 bp, synthetic construct
  misc_feature 1..23: note = Synthetic construct
  source 1..23: mol_type = other DNA
gaggtacctgggccgaagcccgc

SEQ ID NO: 15248 - DNA, 23 bp, synthetic construct
  misc_feature 1..23: note = Synthetic construct
  source 1..23: mol_type = other DNA
gaggtgcctgggccgaagcccgc

SEQ ID NO: 15249 - DNA, 23 bp, synthetic construct
  misc_feature 1..23: note = Synthetic construct
  source 1..23: mol_type = other DNA
gaggttcctgggccgaagcccgc

SEQ ID NO: 15250 - DNA, 23 bp, synthetic construct
  misc_feature 1..23: note = Synthetic construct
  source 1..23: mol_type = other DNA
gaggtcactgggccgaagcccgc

SEQ ID NO: 15251 - DNA, 23 bp, synthetic construct
  misc_feature 1..23: note = Synthetic construct
  source 1..23: mol_type = other DNA
gaggtcgctgggccgaagcccgc

SEQ ID NO: 15252 - DNA, 23 bp, synthetic construct
  misc_feature 1..23: note = Synthetic construct
  source 1..23: mol_type = other DNA
gaggtctctgggccgaagcccgc

SEQ ID NO: 15253 - DNA, 23 bp, synthetic construct
  misc_feature 1..23: note = Synthetic construct
  source 1..23: mol_type = other DNA
gaggtccatgggccgaagcccgc

SEQ ID NO: 15254 - DNA, 23 bp, synthetic construct
  misc_feature 1..23: note = Synthetic construct
  source 1..23: mol_type = other DNA
gaggtccgtgggccgaagcccgc

SEQ ID NO: 15255 - DNA, 23 bp, synthetic construct
  misc_feature 1..23: note = Synthetic construct
  source 1..23: mol_type = other DNA
gaggtccttgggccgaagcccgc

SEQ ID NO: 15256 - DNA, 23 bp, synthetic construct
  misc_feature 1..23: note = Synthetic construct
  source 1..23: mol_type = other DNA
gaggtcccagggccgaagcccgc

SEQ ID NO: 15257 - DNA, 23 bp, synthetic construct
  misc_feature 1..23: note = Synthetic construct
  source 1..23: mol_type = other DNA
gaggtccccgggccgaagcccgc

SEQ ID NO: 15258 - DNA, 23 bp, synthetic construct
  misc_feature 1..23: note = Synthetic construct
  source 1..23: mol_type = other DNA
gaggtcccggggccgaagcccgc

SEQ ID NO: 15259 - DNA, 23 bp, synthetic construct
  misc_feature 1..23: note = Synthetic construct
  source 1..23: mol_type = other DNA
gaggtccctaggccgaagcccgc

SEQ ID NO: 15260 - DNA, 23 bp, synthetic construct
  misc_feature 1..23: note = Synthetic construct
  source 1..23: mol_type = other DNA
gaggtccctcggccgaagcccgc

SEQ ID NO: 15261 - DNA, 23 bp, synthetic construct
  misc_feature 1..23: note = Synthetic construct
  source 1..23: mol_type = other DNA
gaggtcccttggccgaagcccgc

SEQ ID NO: 15262 - DNA, 23 bp, synthetic construct
  misc_feature 1..23: note = Synthetic construct
  source 1..23: mol_type = other DNA
gaggtccctgagccgaagcccgc

SEQ ID NO: 15263 - DNA, 23 bp, synthetic construct
  misc_feature 1..23: note = Synthetic construct
  source 1..23: mol_type = other DNA
gaggtccctgcgccgaagcccgc

SEQ ID NO: 15264 - DNA, 23 bp, synthetic construct
  misc_feature 1..23: note = Synthetic construct
  source 1..23: mol_type = other DNA
gaggtccctgtgccgaagcccgc

SEQ ID NO: 15265 - DNA, 23 bp, synthetic construct
  misc_feature 1..23: note = Synthetic construct
  source 1..23: mol_type = other DNA
gaggtccctggaccgaagcccgc

SEQ ID NO: 15266 - DNA, 23 bp, synthetic construct
  misc_feature 1..23: note = Synthetic construct
  source 1..23: mol_type = other DNA
gaggtccctggcccgaagcccgc

SEQ ID NO: 15267 - DNA, 23 bp, synthetic construct
  misc_feature 1..23: note = Synthetic construct
  source 1..23: mol_type = other DNA
gaggtccctggtccgaagcccgc

SEQ ID NO: 15268 - DNA, 23 bp, synthetic construct
  misc_feature 1..23: note = Synthetic construct
  source 1..23: mol_type = other DNA
gaggtccctgggacgaagcccgc

SEQ ID NO: 15269 - DNA, 23 bp, synthetic construct
  misc_feature 1..23: note = Synthetic construct
  source 1..23: mol_type = other DNA
gaggtccctggggcgaagcccgc

SEQ ID NO: 15270 - DNA, 23 bp, synthetic construct
  misc_feature 1..23: note = Synthetic construct
  source 1..23: mol_type = other DNA
gaggtccctgggtcgaagcccgc

SEQ ID NO: 15271 - DNA, 23 bp, synthetic construct
  misc_feature 1..23: note = Synthetic construct
  source 1..23: mol_type = other DNA
gaggtccctgggcagaagcccgc

SEQ ID NO: 15272 - DNA, 23 bp, synthetic construct
  misc_feature 1..23: note = Synthetic construct
  source 1..23: mol_type = other DNA
gaggtccctgggcggaagcccgc

SEQ ID NO: 15273 - DNA, 23 bp, synthetic construct
  misc_feature 1..23: note = Synthetic construct
  source 1..23: mol_type = other DNA
gaggtccctgggctgaagcccgc

SEQ ID NO: 15274 - DNA, 23 bp, synthetic construct
  misc_feature 1..23: note = Synthetic construct
  source 1..23: mol_type = other DNA
gaggtccctgggccaaagcccgc

SEQ ID NO: 15275 - DNA, 23 bp, synthetic construct
  misc_feature 1..23: note = Synthetic construct
  source 1..23: mol_type = other DNA
gaggtccctgggcccaagcccgc

SEQ ID NO: 15276 - DNA, 23 bp, synthetic construct
  misc_feature 1..23: note = Synthetic construct
  source 1..23: mol_type = other DNA
gaggtccctgggcctaagcccgc

SEQ ID NO: 15277 - DNA, 23 bp, synthetic construct
  misc_feature 1..23: note = Synthetic construct
  source 1..23: mol_type = other DNA
gaggtccctgggccgcagcccgc

SEQ ID NO: 15278 - DNA, 23 bp, synthetic construct
  misc_feature 1..23: note = Synthetic construct
  source 1..23: mol_type = other DNA
gaggtccctgggccggagcccgc

SEQ ID NO: 15279 - DNA, 23 bp, synthetic construct
  misc_feature 1..23: note = Synthetic construct
  source 1..23: mol_type = other DNA
gaggtccctgggccgtagcccgc

SEQ ID NO: 15280 - DNA, 23 bp, synthetic construct
  misc_feature 1..23: note = Synthetic construct
  source 1..23: mol_type = other DNA
gaggtccctgggccgacgcccgc

SEQ ID NO: 15281 - DNA, 23 bp, synthetic construct
  misc_feature 1..23: note = Synthetic construct
  source 1..23: mol_type = other DNA
gaggtccctgggccgaggcccgc

SEQ ID NO: 15282 - DNA, 23 bp, synthetic construct
  misc_feature 1..23: note = Synthetic construct
  source 1..23: mol_type = other DNA
gaggtccctgggccgatgcccgc

SEQ ID NO: 15283 - DNA, 23 bp, synthetic construct
  misc_feature 1..23: note = Synthetic construct
  source 1..23: mol_type = other DNA
gaggtccctgggccgaaacccgc

SEQ ID NO: 15284 - DNA, 23 bp, synthetic construct
  misc_feature 1..23: note = Synthetic construct
  source 1..23: mol_type = other DNA
gaggtccctgggccgaaccccgc

SEQ ID NO: 15285 - DNA, 23 bp, synthetic construct
  misc_feature 1..23: note = Synthetic construct
  source 1..23: mol_type = other DNA
gaggtccctgggccgaatcccgc

SEQ ID NO: 15286 - DNA, 23 bp, synthetic construct
  misc_feature 1..23: note = Synthetic construct
  source 1..23: mol_type = other DNA
gaggtccctgggccgaagaccgc

SEQ ID NO: 15287 - DNA, 23 bp, synthetic construct
  misc_feature 1..23: note = Synthetic construct
  source 1..23: mol_type = other DNA
gaggtccctgggccgaaggccgc

SEQ ID NO: 15288 - DNA, 23 bp, synthetic construct
  misc_feature 1..23: note = Synthetic construct
  source 1..23: mol_type = other DNA
gaggtccctgggccgaagtccgc

SEQ ID NO: 15289 - DNA, 23 bp, synthetic construct
  misc_feature 1..23: note = Synthetic construct
  source 1..23: mol_type = other DNA
gaggtccctgggccgaagcacgc

SEQ ID NO: 15290 - DNA, 23 bp, synthetic construct
  misc_feature 1..23: note = Synthetic construct
  source 1..23: mol_type = other DNA
gaggtccctgggccgaagcgcgc

SEQ ID NO: 15291 - DNA, 23 bp, synthetic construct
  misc_feature 1..23: note = Synthetic construct
  source 1..23: mol_type = other DNA
gaggtccctgggccgaagctcgc

SEQ ID NO: 15292 - DNA, 23 bp, synthetic construct
  misc_feature 1..23: note = Synthetic construct
  source 1..23: mol_type = other DNA
gaggtccctgggccgaagccagc

SEQ ID NO: 15293 - DNA, 23 bp, synthetic construct
  misc_feature 1..23: note = Synthetic construct
  source 1..23: mol_type = other DNA
gaggtccctgggccgaagccggc

SEQ ID NO: 15294 - DNA, 23 bp, synthetic construct
  misc_feature 1..23: note = Synthetic construct
  source 1..23: mol_type = other DNA
gaggtccctgggccgaagcctgc

SEQ ID NO: 15295 - DNA, 23 bp, synthetic construct
  misc_feature 1..23: note = Synthetic construct
  source 1..23: mol_type = other DNA
gaggtccctgggccgaagcccac

SEQ ID NO: 15296 - DNA, 23 bp, synthetic construct
  misc_feature 1..23: note = Synthetic construct
  source 1..23: mol_type = other DNA
gaggtccctgggccgaagccccc

SEQ ID NO: 15297 - DNA, 23 bp, synthetic construct
  misc_feature 1..23: note = Synthetic construct
  source 1..23: mol_type = other DNA
gaggtccctgggccgaagccctc

SEQ ID NO: 15298 - DNA, 23 bp, synthetic construct
  misc_feature 1..23: note = Synthetic construct
  source 1..23: mol_type = other DNA
gaggtccctgggccgaagcccga

SEQ ID NO: 15299 - DNA, 23 bp, synthetic construct
  misc_feature 1..23: note = Synthetic construct
  source 1..23: mol_type = other DNA
gaggtccctgggccgaagcccgg

SEQ ID NO: 15300 - DNA, 23 bp, synthetic construct
  misc_feature 1..23: note = Synthetic construct
  source 1..23: mol_type = other DNA
gaggtccctgggccgaagcccgt

SEQ ID NO: 15301 - DNA, 22 bp, synthetic construct
  misc_feature 1..22: note = Synthetic construct
  source 1..22: mol_type = other DNA
atcataggaagaaactcttgaa

SEQ ID NO: 15302 - DNA, 22 bp, synthetic construct
  misc_feature 1..22: note = Synthetic construct
  source 1..22: mol_type = other DNA
gtcataggaagaaactcttgaa

SEQ ID NO: 15303 - DNA, 22 bp, synthetic construct
  misc_feature 1..22: note = Synthetic construct
  source 1..22: mol_type = other DNA
ttcataggaagaaactcttgaa

SEQ ID NO: 15304 - DNA, 22 bp, synthetic construct
  misc_feature 1..22: note = Synthetic construct
  source 1..22: mol_type = other DNA
cacataggaagaaactcttgaa

SEQ ID NO: 15305 - DNA, 22 bp, synthetic construct
  misc_feature 1..22: note = Synthetic construct
  source 1..22: mol_type = other DNA
cccataggaagaaactcttgaa

SEQ ID NO: 15306 - DNA, 22 bp, synthetic construct
  misc_feature 1..22: note = Synthetic construct
  source 1..22: mol_type = other DNA
cgcataggaagaaactcttgaa

SEQ ID NO: 15307 - DNA, 22 bp, synthetic construct
  misc_feature 1..22: note = Synthetic construct
  source 1..22: mol_type = other DNA
ctaataggaagaaactcttgaa

SEQ ID NO: 15308 - DNA, 22 bp, synthetic construct
  misc_feature 1..22: note = Synthetic construct
  source 1..22: mol_type = other DNA
ctgataggaagaaactcttgaa

SEQ ID NO: 15309 - DNA, 22 bp, synthetic construct
  misc_feature 1..22: note = Synthetic construct
  source 1..22: mol_type = other DNA
cttataggaagaaactcttgaa

SEQ ID NO: 15310 - DNA, 22 bp, synthetic construct
  misc_feature 1..22: note = Synthetic construct
  source 1..22: mol_type = other DNA
ctcctaggaagaaactcttgaa

SEQ ID NO: 15311 - DNA, 22 bp, synthetic construct
  misc_feature 1..22: note = Synthetic construct
  source 1..22: mol_type = other DNA
ctcgtaggaagaaactcttgaa

SEQ ID NO: 15312 - DNA, 22 bp, synthetic construct
  misc_feature 1..22: note = Synthetic construct
  source 1..22: mol_type = other DNA
ctcttaggaagaaactcttgaa

SEQ ID NO: 15313 - DNA, 22 bp, synthetic construct
  misc_feature 1..22: note = Synthetic construct
  source 1..22: mol_type = other DNA
ctcaaaggaagaaactcttgaa

SEQ ID NO: 15314 - DNA, 22 bp, synthetic construct
  misc_feature 1..22: note = Synthetic construct
  source 1..22: mol_type = other DNA
ctcacaggaagaaactcttgaa

SEQ ID NO: 15315 - DNA, 22 bp, synthetic construct
  misc_feature 1..22: note = Synthetic construct
  source 1..22: mol_type = other DNA
ctcagaggaagaaactcttgaa

SEQ ID NO: 15316 - DNA, 22 bp, synthetic construct
  misc_feature 1..22: note = Synthetic construct
  source 1..22: mol_type = other DNA
ctcatcggaagaaactcttgaa

SEQ ID NO: 15317 - DNA, 22 bp, synthetic construct
  misc_feature 1..22: note = Synthetic construct
  source 1..22: mol_type = other DNA
ctcatgggaagaaactcttgaa

SEQ ID NO: 15318 - DNA, 22 bp, synthetic construct
  misc_feature 1..22: note = Synthetic construct
  source 1..22: mol_type = other DNA
ctcattggaagaaactcttgaa

SEQ ID NO: 15319 - DNA, 22 bp, synthetic construct
  misc_feature 1..22: note = Synthetic construct
  source 1..22: mol_type = other DNA
ctcataagaagaaactcttgaa

SEQ ID NO: 15320 - DNA, 22 bp, synthetic construct
  misc_feature 1..22: note = Synthetic construct
  source 1..22: mol_type = other DNA
ctcatacgaagaaactcttgaa

SEQ ID NO: 15321 - DNA, 22 bp, synthetic construct
  misc_feature 1..22: note = Synthetic construct
  source 1..22: mol_type = other DNA
ctcatatgaagaaactcttgaa

SEQ ID NO: 15322 - DNA, 22 bp, synthetic construct
  misc_feature 1..22: note = Synthetic construct
  source 1..22: mol_type = other DNA
ctcatagaaagaaactcttgaa

SEQ ID NO: 15323 - DNA, 22 bp, synthetic construct
  misc_feature 1..22: note = Synthetic construct
  source 1..22: mol_type = other DNA
ctcatagcaagaaactcttgaa

SEQ ID NO: 15324 - DNA, 22 bp, synthetic construct
  misc_feature 1..22: note = Synthetic construct
  source 1..22: mol_type = other DNA
ctcatagtaagaaactcttgaa

SEQ ID NO: 15325 - DNA, 22 bp, synthetic construct
  misc_feature 1..22: note = Synthetic construct
  source 1..22: mol_type = other DNA
ctcataggcagaaactcttgaa

SEQ ID NO: 15326 - DNA, 22 bp, synthetic construct
  misc_feature 1..22: note = Synthetic construct
  source 1..22: mol_type = other DNA
ctcatagggagaaactcttgaa

SEQ ID NO: 15327 - DNA, 22 bp, synthetic construct
  misc_feature 1..22: note = Synthetic construct
  source 1..22: mol_type = other DNA
ctcataggtagaaactcttgaa

SEQ ID NO: 15328 - DNA, 22 bp, synthetic construct
  misc_feature 1..22: note = Synthetic construct
  source 1..22: mol_type = other DNA
ctcataggacgaaactcttgaa

SEQ ID NO: 15329 - DNA, 22 bp, synthetic construct
  misc_feature 1..22: note = Synthetic construct
  source 1..22: mol_type = other DNA
ctcataggaggaaactcttgaa

SEQ ID NO: 15330 - DNA, 22 bp, synthetic construct
  misc_feature 1..22: note = Synthetic construct
  source 1..22: mol_type = other DNA
ctcataggatgaaactcttgaa

SEQ ID NO: 15331 - DNA, 22 bp, synthetic construct
  misc_feature 1..22: note = Synthetic construct
  source 1..22: mol_type = other DNA
ctcataggaaaaaactcttgaa

SEQ ID NO: 15332 - DNA, 22 bp, synthetic construct
  misc_feature 1..22: note = Synthetic construct
  source 1..22: mol_type = other DNA
ctcataggaacaaactcttgaa

SEQ ID NO: 15333 - DNA, 22 bp, synthetic construct
  misc_feature 1..22: note = Synthetic construct
  source 1..22: mol_type = other DNA
ctcataggaataaactcttgaa

SEQ ID NO: 15334 - DNA, 22 bp, synthetic construct
  misc_feature 1..22: note = Synthetic construct
  source 1..22: mol_type = other DNA
ctcataggaagcaactcttgaa

SEQ ID NO: 15335 - DNA, 22 bp, synthetic construct
  misc_feature 1..22: note = Synthetic construct
  source 1..22: mol_type = other DNA
ctcataggaaggaactcttgaa

SEQ ID NO: 15336 - DNA, 22 bp, synthetic construct
  misc_feature 1..22: note = Synthetic construct
  source 1..22: mol_type = other DNA
ctcataggaagtaactcttgaa

SEQ ID NO: 15337 - DNA, 22 bp, synthetic construct
  misc_feature 1..22: note = Synthetic construct
  source 1..22: mol_type = other DNA
ctcataggaagacactcttgaa

SEQ ID NO: 15338 - DNA, 22 bp, synthetic construct
  misc_feature 1..22: note = Synthetic construct
  source 1..22: mol_type = other DNA
ctcataggaagagactcttgaa

SEQ ID NO: 15339 - DNA, 22 bp, synthetic construct
  misc_feature 1..22: note = Synthetic construct
  source 1..22: mol_type = other DNA
ctcataggaagatactcttgaa

SEQ ID NO: 15340 - DNA, 22 bp, synthetic construct
  misc_feature 1..22: note = Synthetic construct
  source 1..22: mol_type = other DNA
ctcataggaagaacctcttgaa

SEQ ID NO: 15341 - DNA, 22 bp, synthetic construct
  misc_feature 1..22: note = Synthetic construct
  source 1..22: mol_type = other DNA
ctcataggaagaagctcttgaa

SEQ ID NO: 15342 - DNA, 22 bp, synthetic construct
  misc_feature 1..22: note = Synthetic construct
  source 1..22: mol_type = other DNA
ctcataggaagaatctcttgaa

SEQ ID NO: 15343 - DNA, 22 bp, synthetic construct
  misc_feature 1..22: note = Synthetic construct
  source 1..22: mol_type = other DNA
ctcataggaagaaaatcttgaa

SEQ ID NO: 15344 - DNA, 22 bp, synthetic construct
  misc_feature 1..22: note = Synthetic construct
  source 1..22: mol_type = other DNA
ctcataggaagaaagtcttgaa

SEQ ID NO: 15345 - DNA, 22 bp, synthetic construct
  misc_feature 1..22: note = Synthetic construct
  source 1..22: mol_type = other DNA
ctcataggaagaaattcttgaa

SEQ ID NO: 15346 - DNA, 22 bp, synthetic construct
  misc_feature 1..22: note = Synthetic construct
  source 1..22: mol_type = other DNA
ctcataggaagaaacacttgaa

SEQ ID NO: 15347 - DNA, 22 bp, synthetic construct
  misc_feature 1..22: note = Synthetic construct
  source 1..22: mol_type = other DNA
ctcataggaagaaacccttgaa

SEQ ID NO: 15348 - DNA, 22 bp, synthetic construct
  misc_feature 1..22: note = Synthetic construct
  source 1..22: mol_type = other DNA
ctcataggaagaaacgcttgaa

SEQ ID NO: 15349 - DNA, 22 bp, synthetic construct
  misc_feature 1..22: note = Synthetic construct
  source 1..22: mol_type = other DNA
ctcataggaagaaactattgaa

SEQ ID NO: 15350 - DNA, 22 bp, synthetic construct
  misc_feature 1..22: note = Synthetic construct
  source 1..22: mol_type = other DNA
ctcataggaagaaactgttgaa

SEQ ID NO: 15351 - DNA, 22 bp, synthetic construct
  misc_feature 1..22: note = Synthetic construct
  source 1..22: mol_type = other DNA
ctcataggaagaaacttttgaa

SEQ ID NO: 15352 - DNA, 22 bp, synthetic construct
  misc_feature 1..22: note = Synthetic construct
  source 1..22: mol_type = other DNA
ctcataggaagaaactcatgaa

SEQ ID NO: 15353 - DNA, 22 bp, synthetic construct
  misc_feature 1..22: note = Synthetic construct
  source 1..22: mol_type = other DNA
ctcataggaagaaactcctgaa

SEQ ID NO: 15354 - DNA, 22 bp, synthetic construct
  misc_feature 1..22: note = Synthetic construct
  source 1..22: mol_type = other DNA
ctcataggaagaaactcgtgaa

SEQ ID NO: 15355 - DNA, 22 bp, synthetic construct
  misc_feature 1..22: note = Synthetic construct
  source 1..22: mol_type = other DNA
ctcataggaagaaactctagaa

SEQ ID NO: 15356 - DNA, 22 bp, synthetic construct
  misc_feature 1..22: note = Synthetic construct
  source 1..22: mol_type = other DNA
ctcataggaagaaactctcgaa

SEQ ID NO: 15357 - DNA, 22 bp, synthetic construct
  misc_feature 1..22: note = Synthetic construct
  source 1..22: mol_type = other DNA
ctcataggaagaaactctggaa

SEQ ID NO: 15358 - DNA, 22 bp, synthetic construct
  misc_feature 1..22: note = Synthetic construct
  source 1..22: mol_type = other DNA
ctcataggaagaaactcttaaa

SEQ ID NO: 15359 - DNA, 22 bp, synthetic construct
  misc_feature 1..22: note = Synthetic construct
  source 1..22: mol_type = other DNA
ctcataggaagaaactcttcaa

SEQ ID NO: 15360 - DNA, 22 bp, synthetic construct
  misc_feature 1..22: note = Synthetic construct
  source 1..22: mol_type = other DNA
ctcataggaagaaactctttaa

SEQ ID NO: 15361 - DNA, 22 bp, synthetic construct
  misc_feature 1..22: note = Synthetic construct
  source 1..22: mol_type = other DNA
ctcataggaagaaactcttgca

SEQ ID NO: 15362 - DNA, 22 bp, synthetic construct
  misc_feature 1..22: note = Synthetic construct
  source 1..22: mol_type = other DNA
ctcataggaagaaactcttgga

SEQ ID NO: 15363 - DNA, 22 bp, synthetic construct
  misc_feature 1..22: note = Synthetic construct
  source 1..22: mol_type = other DNA
ctcataggaagaaactcttgta

SEQ ID NO: 15364 - DNA, 22 bp, synthetic construct
  misc_feature 1..22: note = Synthetic construct
  source 1..22: mol_type = other DNA
ctcataggaagaaactcttgac

SEQ ID NO: 15365 - DNA, 22 bp, synthetic construct
  misc_feature 1..22: note = Synthetic construct
  source 1..22: mol_type = other DNA
ctcataggaagaaactcttgag

SEQ ID NO: 15366 - DNA, 22 bp, synthetic construct
  misc_feature 1..22: note = Synthetic construct
  source 1..22: mol_type = other DNA
ctcataggaagaaactcttgat

SEQ ID NO: 15367 - DNA, 22 bp, synthetic construct
  misc_feature 1..22: note = Synthetic construct
  source 1..22: mol_type = other DNA
cgcaagacggaaacccgaggta

SEQ ID NO: 15368 - DNA, 22 bp, synthetic construct
  misc_feature 1..22: note = Synthetic construct
  source 1..22: mol_type = other DNA
ggcaagacggaaacccgaggta

SEQ ID NO: 15369 - DNA, 22 bp, synthetic construct
  misc_feature 1..22: note = Synthetic construct
  source 1..22: mol_type = other DNA
tgcaagacggaaacccgaggta

SEQ ID NO: 15370 - DNA, 22 bp, synthetic construct
  misc_feature 1..22: note = Synthetic construct
  source 1..22: mol_type = other DNA
aacaagacggaaacccgaggta

SEQ ID NO: 15371 - DNA, 22 bp, synthetic construct
  misc_feature 1..22: note = Synthetic construct
  source 1..22: mol_type = other DNA
accaagacggaaacccgaggta

SEQ ID NO: 15372 - DNA, 22 bp, synthetic construct
  misc_feature 1..22: note = Synthetic construct
  source 1..22: mol_type = other DNA
atcaagacggaaacccgaggta

SEQ ID NO: 15373 - DNA, 22 bp, synthetic construct
  misc_feature 1..22: note = Synthetic construct
  source 1..22: mol_type = other DNA
agaaagacggaaacccgaggta

SEQ ID NO: 15374 - DNA, 22 bp, synthetic construct
  misc_feature 1..22: note = Synthetic construct
  source 1..22: mol_type = other DNA
aggaagacggaaacccgaggta

SEQ ID NO: 15375 - DNA, 22 bp, synthetic construct
  misc_feature 1..22: note = Synthetic construct
  source 1..22: mol_type = other DNA
agtaagacggaaacccgaggta

SEQ ID NO: 15376 - DNA, 22 bp, synthetic construct
  misc_feature 1..22: note = Synthetic construct
  source 1..22: mol_type = other DNA
agccagacggaaacccgaggta

SEQ ID NO: 15377 - DNA, 22 bp, synthetic construct
  misc_feature 1..22: note = Synthetic construct
  source 1..22: mol_type = other DNA
agcgagacggaaacccgaggta

SEQ ID NO: 15378 - DNA, 22 bp, synthetic construct
  misc_feature 1..22: note = Synthetic construct
  source 1..22: mol_type = other DNA
agctagacggaaacccgaggta

SEQ ID NO: 15379 - DNA, 22 bp, synthetic construct
  misc_feature 1..22: note = Synthetic construct
  source 1..22: mol_type = other DNA
agcacgacggaaacccgaggta

SEQ ID NO: 15380 - DNA, 22 bp, synthetic construct
  misc_feature 1..22: note = Synthetic construct
  source 1..22: mol_type = other DNA
agcaggacggaaacccgaggta

SEQ ID NO: 15381 - DNA, 22 bp, synthetic construct
  misc_feature 1..22: note = Synthetic construct
  source 1..22: mol_type = other DNA
agcatgacggaaacccgaggta

SEQ ID NO: 15382 - DNA, 22 bp, synthetic construct
  misc_feature 1..22: note = Synthetic construct
  source 1..22: mol_type = other DNA
agcaaaacggaaacccgaggta

SEQ ID NO: 15383 - DNA, 22 bp, synthetic construct
  misc_feature 1..22: note = Synthetic construct
  source 1..22: mol_type = other DNA
agcaacacggaaacccgaggta

SEQ ID NO: 15384 - DNA, 22 bp, synthetic construct
  misc_feature 1..22: note = Synthetic construct
  source 1..22: mol_type = other DNA
agcaatacggaaacccgaggta

SEQ ID NO: 15385 - DNA, 22 bp, synthetic construct
  misc_feature 1..22: note = Synthetic construct
  source 1..22: mol_type = other DNA
agcaagccggaaacccgaggta

SEQ ID NO: 15386 - DNA, 22 bp, synthetic construct
  misc_feature 1..22: note = Synthetic construct
  source 1..22: mol_type = other DNA
agcaaggcggaaacccgaggta

SEQ ID NO: 15387 - DNA, 22 bp, synthetic construct
  misc_feature 1..22: note = Synthetic construct
  source 1..22: mol_type = other DNA
agcaagtcggaaacccgaggta

SEQ ID NO: 15388 - DNA, 22 bp, synthetic construct
  misc_feature 1..22: note = Synthetic construct
  source 1..22: mol_type = other DNA
agcaagaaggaaacccgaggta

SEQ ID NO: 15389 - DNA, 22 bp, synthetic construct
  misc_feature 1..22: note = Synthetic construct
  source 1..22: mol_type = other DNA
agcaagagggaaacccgaggta

SEQ ID NO: 15390 - DNA, 22 bp, synthetic construct
  misc_feature 1..22: note = Synthetic construct
  source 1..22: mol_type = other DNA
agcaagatggaaacccgaggta

SEQ ID NO: 15391 - DNA, 22 bp, synthetic construct
  misc_feature 1..22: note = Synthetic construct
  source 1..22: mol_type = other DNA
agcaagacagaaacccgaggta

SEQ ID NO: 15392 - DNA, 22 bp, synthetic construct
  misc_feature 1..22: note = Synthetic construct
  source 1..22: mol_type = other DNA
agcaagaccgaaacccgaggta

SEQ ID NO: 15393 - DNA, 22 bp, synthetic construct
  misc_feature 1..22: note = Synthetic construct
  source 1..22: mol_type = other DNA
agcaagactgaaacccgaggta

SEQ ID NO: 15394 - DNA, 22 bp, synthetic construct
  misc_feature 1..22: note = Synthetic construct
  source 1..22: mol_type = other DNA
agcaagacgaaaacccgaggta

SEQ ID NO: 15395 - DNA, 22 bp, synthetic construct
  misc_feature 1..22: note = Synthetic construct
  source 1..22: mol_type = other DNA
agcaagacgcaaacccgaggta

SEQ ID NO: 15396 - DNA, 22 bp, synthetic construct
  misc_feature 1..22: note = Synthetic construct
  source 1..22: mol_type = other DNA
agcaagacgtaaacccgaggta

SEQ ID NO: 15397 - DNA, 22 bp, synthetic construct
  misc_feature 1..22: note = Synthetic construct
  source 1..22: mol_type = other DNA
agcaagacggcaacccgaggta

SEQ ID NO: 15398 - DNA, 22 bp, synthetic construct
  misc_feature 1..22: note = Synthetic construct
  source 1..22: mol_type = other DNA
agcaagacgggaacccgaggta

SEQ ID NO: 15399 - DNA, 22 bp, synthetic construct
  misc_feature 1..22: note = Synthetic construct
  source 1..22: mol_type = other DNA
agcaagacggtaacccgaggta

SEQ ID NO: 15400 - DNA, 22 bp, synthetic construct
  misc_feature 1..22: note = Synthetic construct
  source 1..22: mol_type = other DNA
agcaagacggacacccgaggta

SEQ ID NO: 15401 - DNA, 22 bp, synthetic construct
  misc_feature 1..22: note = Synthetic construct
  source 1..22: mol_type = other DNA
agcaagacggagacccgaggta

SEQ ID NO: 15402 - DNA, 22 bp, synthetic construct
  misc_feature 1..22: note = Synthetic construct
  source 1..22: mol_type = other DNA
agcaagacggatacccgaggta

SEQ ID NO: 15403 - DNA, 22 bp, synthetic construct
  misc_feature 1..22: note = Synthetic construct
  source 1..22: mol_type = other DNA
agcaagacggaaccccgaggta

SEQ ID NO: 15404 - DNA, 22 bp, synthetic construct
  misc_feature 1..22: note = Synthetic construct
  source 1..22: mol_type = other DNA
agcaagacggaagcccgaggta

SEQ ID NO: 15405 - DNA, 22 bp, synthetic construct
  misc_feature 1..22: note = Synthetic construct
  source 1..22: mol_type = other DNA
agcaagacggaatcccgaggta

SEQ ID NO: 15406 - DNA, 22 bp, synthetic construct
  misc_feature 1..22: note = Synthetic construct
  source 1..22: mol_type = other DNA
agcaagacggaaaaccgaggta

SEQ ID NO: 15407 - DNA, 22 bp, synthetic construct
  misc_feature 1..22: note = Synthetic construct
  source 1..22: mol_type = other DNA
agcaagacggaaagccgaggta

SEQ ID NO: 15408 - DNA, 22 bp, synthetic construct
  misc_feature 1..22: note = Synthetic construct
  source 1..22: mol_type = other DNA
agcaagacggaaatccgaggta

SEQ ID NO: 15409 - DNA, 22 bp, synthetic construct
  misc_feature 1..22: note = Synthetic construct
  source 1..22: mol_type = other DNA
agcaagacggaaacacgaggta

SEQ ID NO: 15410 - DNA, 22 bp, synthetic construct
  misc_feature 1..22: note = Synthetic construct
  source 1..22: mol_type = other DNA
agcaagacggaaacgcgaggta

SEQ ID NO: 15411 - DNA, 22 bp, synthetic construct
  misc_feature 1..22: note = Synthetic construct
  source 1..22: mol_type = other DNA
agcaagacggaaactcgaggta

SEQ ID NO: 15412 - DNA, 22 bp, synthetic construct
  misc_feature 1..22: note = Synthetic construct
  source 1..22: mol_type = other DNA
agcaagacggaaaccagaggta

SEQ ID NO: 15413 - DNA, 22 bp, synthetic construct
  misc_feature 1..22: note = Synthetic construct
  source 1..22: mol_type = other DNA
agcaagacggaaaccggaggta

SEQ ID NO: 15414 - DNA, 22 bp, synthetic construct
  misc_feature 1..22: note = Synthetic construct
  source 1..22: mol_type = other DNA
agcaagacggaaacctgaggta

SEQ ID NO: 15415 - DNA, 22 bp, synthetic construct
  misc_feature 1..22: note = Synthetic construct
  source 1..22: mol_type = other DNA
agcaagacggaaacccaaggta

SEQ ID NO: 15416 - DNA, 22 bp, synthetic construct
  misc_feature 1..22: note = Synthetic construct
  source 1..22: mol_type = other DNA
agcaagacggaaaccccaggta

SEQ ID NO: 15417 - DNA, 22 bp, synthetic construct
  misc_feature 1..22: note = Synthetic construct
  source 1..22: mol_type = other DNA
agcaagacggaaaccctaggta

SEQ ID NO: 15418 - DNA, 22 bp, synthetic construct
  misc_feature 1..22: note = Synthetic construct
  source 1..22: mol_type = other DNA
agcaagacggaaacccgcggta

SEQ ID NO: 15419 - DNA, 22 bp, synthetic construct
  misc_feature 1..22: note = Synthetic construct
  source 1..22: mol_type = other DNA
agcaagacggaaacccggggta

SEQ ID NO: 15420 - DNA, 22 bp, synthetic construct
  misc_feature 1..22: note = Synthetic construct
  source 1..22: mol_type = other DNA
agcaagacggaaacccgtggta

SEQ ID NO: 15421 - DNA, 22 bp, synthetic construct
  misc_feature 1..22: note = Synthetic construct
  source 1..22: mol_type = other DNA
agcaagacggaaacccgaagta

SEQ ID NO: 15422 - DNA, 22 bp, synthetic construct
  misc_feature 1..22: note = Synthetic construct
  source 1..22: mol_type = other DNA
agcaagacggaaacccgacgta

SEQ ID NO: 15423 - DNA, 22 bp, synthetic construct
  misc_feature 1..22: note = Synthetic construct
  source 1..22: mol_type = other DNA
agcaagacggaaacccgatgta

SEQ ID NO: 15424 - DNA, 22 bp, synthetic construct
  misc_feature 1..22: note = Synthetic construct
  source 1..22: mol_type = other DNA
agcaagacggaaacccgagata

SEQ ID NO: 15425 - DNA, 22 bp, synthetic construct
  misc_feature 1..22: note = Synthetic construct
  source 1..22: mol_type = other DNA
agcaagacggaaacccgagcta

SEQ ID NO: 15426 - DNA, 22 bp, synthetic construct
  misc_feature 1..22: note = Synthetic construct
  source 1..22: mol_type = other DNA
agcaagacggaaacccgagtta

SEQ ID NO: 15427 - DNA, 22 bp, synthetic construct
  misc_feature 1..22: note = Synthetic construct
  source 1..22: mol_type = other DNA
agcaagacggaaacccgaggaa

SEQ ID NO: 15428 - DNA, 22 bp, synthetic construct
  misc_feature 1..22: note = Synthetic construct
  source 1..22: mol_type = other DNA
agcaagacggaaacccgaggca

SEQ ID NO: 15429 - DNA, 22 bp, synthetic construct
  misc_feature 1..22: note = Synthetic construct
  source 1..22: mol_type = other DNA
agcaagacggaaacccgaggga

SEQ ID NO: 15430 - DNA, 22 bp, synthetic construct
  misc_feature 1..22: note = Synthetic construct
  source 1..22: mol_type = other DNA
agcaagacggaaacccgaggtc

SEQ ID NO: 15431 - DNA, 22 bp, synthetic construct
  misc_feature 1..22: note = Synthetic construct
  source 1..22: mol_type = other DNA
agcaagacggaaacccgaggtg

SEQ ID NO: 15432 - DNA, 22 bp, synthetic construct
  misc_feature 1..22: note = Synthetic construct
  source 1..22: mol_type = other DNA
agcaagacggaaacccgaggtt

SEQ ID NO: 15433 - DNA, 21 bp, synthetic construct
  misc_feature 1..21: note = Synthetic construct
  source 1..21: mol_type = other DNA
atagagctgatccattcagcg

SEQ ID NO: 15434 - DNA, 21 bp, synthetic construct
  misc_feature 1..21: note = Synthetic construct
  source 1..21: mol_type = other DNA
ctagagctgatccattcagcg

SEQ ID NO: 15435 - DNA, 21 bp, synthetic construct
  misc_feature 1..21: note = Synthetic construct
  source 1..21: mol_type = other DNA
gtagagctgatccattcagcg

SEQ ID NO: 15436 - DNA, 21 bp, synthetic construct
  misc_feature 1..21: note = Synthetic construct
  source 1..21: mol_type = other DNA
taagagctgatccattcagcg

SEQ ID NO: 15437 - DNA, 21 bp, synthetic construct
  misc_feature 1..21: note = Synthetic construct
  source 1..21: mol_type = other DNA
tcagagctgatccattcagcg

SEQ ID NO: 15438 - DNA, 21 bp, synthetic construct
  misc_feature 1..21: note = Synthetic construct
  source 1..21: mol_type = other DNA
tgagagctgatccattcagcg

SEQ ID NO: 15439 - DNA, 21 bp, synthetic construct
  misc_feature 1..21: note = Synthetic construct
  source 1..21: mol_type = other DNA
ttcgagctgatccattcagcg

SEQ ID NO: 15440 - DNA, 21 bp, synthetic construct
  misc_feature 1..21: note = Synthetic construct
  source 1..21: mol_type = other DNA
ttggagctgatccattcagcg

SEQ ID NO: 15441 - DNA, 21 bp, synthetic construct
  misc_feature 1..21: note = Synthetic construct
  source 1..21: mol_type = other DNA
tttgagctgatccattcagcg

SEQ ID NO: 15442 - DNA, 21 bp, synthetic construct
  misc_feature 1..21: note = Synthetic construct
  source 1..21: mol_type = other DNA
ttaaagctgatccattcagcg

SEQ ID NO: 15443 - DNA, 21 bp, synthetic construct
  misc_feature 1..21: note = Synthetic construct
  source 1..21: mol_type = other DNA
ttacagctgatccattcagcg

SEQ ID NO: 15444 - DNA, 21 bp, synthetic construct
  misc_feature 1..21: note = Synthetic construct
  source 1..21: mol_type = other DNA
ttatagctgatccattcagcg

SEQ ID NO: 15445 - DNA, 21 bp, synthetic construct
  misc_feature 1..21: note = Synthetic construct
  source 1..21: mol_type = other DNA
ttagcgctgatccattcagcg

SEQ ID NO: 15446 - DNA, 21 bp, synthetic construct
  misc_feature 1..21: note = Synthetic construct
  source 1..21: mol_type = other DNA
ttagggctgatccattcagcg

SEQ ID NO: 15447 - DNA, 21 bp, synthetic construct
  misc_feature 1..21: note = Synthetic construct
  source 1..21: mol_type = other DNA
ttagtgctgatccattcagcg

SEQ ID NO: 15448 - DNA, 21 bp, synthetic construct
  misc_feature 1..21: note = Synthetic construct
  source 1..21: mol_type = other DNA
ttagaactgatccattcagcg

SEQ ID NO: 15449 - DNA, 21 bp, synthetic construct
  misc_feature 1..21: note = Synthetic construct
  source 1..21: mol_type = other DNA
ttagacctgatccattcagcg

SEQ ID NO: 15450 - DNA, 21 bp, synthetic construct
  misc_feature 1..21: note = Synthetic construct
  source 1..21: mol_type = other DNA
ttagatctgatccattcagcg

SEQ ID NO: 15451 - DNA, 21 bp, synthetic construct
  misc_feature 1..21: note = Synthetic construct
  source 1..21: mol_type = other DNA
ttagagatgatccattcagcg

SEQ ID NO: 15452 - DNA, 21 bp, synthetic construct
  misc_feature 1..21: note = Synthetic construct
  source 1..21: mol_type = other DNA
ttagaggtgatccattcagcg

SEQ ID NO: 15453 - DNA, 21 bp, synthetic construct
  misc_feature 1..21: note = Synthetic construct
  source 1..21: mol_type = other DNA
ttagagttgatccattcagcg

SEQ ID NO: 15454 - DNA, 21 bp, synthetic construct
  misc_feature 1..21: note = Synthetic construct
  source 1..21: mol_type = other DNA
ttagagcagatccattcagcg

SEQ ID NO: 15455 - DNA, 21 bp, synthetic construct
  misc_feature 1..21: note = Synthetic construct
  source 1..21: mol_type = other DNA
ttagagccgatccattcagcg

SEQ ID NO: 15456 - DNA, 21 bp, synthetic construct
  misc_feature 1..21: note = Synthetic construct
  source 1..21: mol_type = other DNA
ttagagcggatccattcagcg

SEQ ID NO: 15457 - DNA, 21 bp, synthetic construct
  misc_feature 1..21: note = Synthetic construct
  source 1..21: mol_type = other DNA
ttagagctaatccattcagcg

SEQ ID NO: 15458 - DNA, 21 bp, synthetic construct
  misc_feature 1..21: note = Synthetic construct
  source 1..21: mol_type = other DNA
ttagagctcatccattcagcg

SEQ ID NO: 15459 - DNA, 21 bp, synthetic construct
  misc_feature 1..21: note = Synthetic construct
  source 1..21: mol_type = other DNA
ttagagcttatccattcagcg

SEQ ID NO: 15460 - DNA, 21 bp, synthetic construct
  misc_feature 1..21: note = Synthetic construct
  source 1..21: mol_type = other DNA
ttagagctgctccattcagcg

SEQ ID NO: 15461 - DNA, 21 bp, synthetic construct
  misc_feature 1..21: note = Synthetic construct
  source 1..21: mol_type = other DNA
ttagagctggtccattcagcg

SEQ ID NO: 15462 - DNA, 21 bp, synthetic construct
  misc_feature 1..21: note = Synthetic construct
  source 1..21: mol_type = other DNA
ttagagctgttccattcagcg

SEQ ID NO: 15463 - DNA, 21 bp, synthetic construct
  misc_feature 1..21: note = Synthetic construct
  source 1..21: mol_type = other DNA
ttagagctgaaccattcagcg

SEQ ID NO: 15464 - DNA, 21 bp, synthetic construct
  misc_feature 1..21: note = Synthetic construct
  source 1..21: mol_type = other DNA
ttagagctgacccattcagcg

SEQ ID NO: 15465 - DNA, 21 bp, synthetic construct
  misc_feature 1..21: note = Synthetic construct
  source 1..21: mol_type = other DNA
ttagagctgagccattcagcg

SEQ ID NO: 15466 - DNA, 21 bp, synthetic construct
  misc_feature 1..21: note = Synthetic construct
  source 1..21: mol_type = other DNA
ttagagctgatacattcagcg

SEQ ID NO: 15467 - DNA, 21 bp, synthetic construct
  misc_feature 1..21: note = Synthetic construct
  source 1..21: mol_type = other DNA
ttagagctgatgcattcagcg

SEQ ID NO: 15468 - DNA, 21 bp, synthetic construct
  misc_feature 1..21: note = Synthetic construct
  source 1..21: mol_type = other DNA
ttagagctgattcattcagcg

SEQ ID NO: 15469 - DNA, 21 bp, synthetic construct
  misc_feature 1..21: note = Synthetic construct
  source 1..21: mol_type = other DNA
ttagagctgatcaattcagcg

SEQ ID NO: 15470 - DNA, 21 bp, synthetic construct
  misc_feature 1..21: note = Synthetic construct
  source 1..21: mol_type = other DNA
ttagagctgatcgattcagcg

SEQ ID NO: 15471 - DNA, 21 bp, synthetic construct
  misc_feature 1..21: note = Synthetic construct
  source 1..21: mol_type = other DNA
ttagagctgatctattcagcg

SEQ ID NO: 15472 - DNA, 21 bp, synthetic construct
  misc_feature 1..21: note = Synthetic construct
  source 1..21: mol_type = other DNA
ttagagctgatcccttcagcg

SEQ ID NO: 15473 - DNA, 21 bp, synthetic construct
  misc_feature 1..21: note = Synthetic construct
  source 1..21: mol_type = other DNA
ttagagctgatccgttcagcg

SEQ ID NO: 15474 - DNA, 21 bp, synthetic construct
  misc_feature 1..21: note = Synthetic construct
  source 1..21: mol_type = other DNA
ttagagctgatcctttcagcg

SEQ ID NO: 15475 - DNA, 21 bp, synthetic construct
  misc_feature 1..21: note = Synthetic construct
  source 1..21: mol_type = other DNA
ttagagctgatccaatcagcg

SEQ ID NO: 15476 - DNA, 21 bp, synthetic construct
  misc_feature 1..21: note = Synthetic construct
  source 1..21: mol_type = other DNA
ttagagctgatccactcagcg

SEQ ID NO: 15477 - DNA, 21 bp, synthetic construct
  misc_feature 1..21: note = Synthetic construct
  source 1..21: mol_type = other DNA
ttagagctgatccagtcagcg

SEQ ID NO: 15478 - DNA, 21 bp, synthetic construct
  misc_feature 1..21: note = Synthetic construct
  source 1..21: mol_type = other DNA
ttagagctgatccatacagcg

SEQ ID NO: 15479 - DNA, 21 bp, synthetic construct
  misc_feature 1..21: note = Synthetic construct
  source 1..21: mol_type = other DNA
ttagagctgatccatccagcg

SEQ ID NO: 15480 - DNA, 21 bp, synthetic construct
  misc_feature 1..21: note = Synthetic construct
  source 1..21: mol_type = other DNA
ttagagctgatccatgcagcg

SEQ ID NO: 15481 - DNA, 21 bp, synthetic construct
  misc_feature 1..21: note = Synthetic construct
  source 1..21: mol_type = other DNA
ttagagctgatccattaagcg

SEQ ID NO: 15482 - DNA, 21 bp, synthetic construct
  misc_feature 1..21: note = Synthetic construct
  source 1..21: mol_type = other DNA
ttagagctgatccattgagcg

SEQ ID NO: 15483 - DNA, 21 bp, synthetic construct
  misc_feature 1..21: note = Synthetic construct
  source 1..21: mol_type = other DNA
ttagagctgatccatttagcg

SEQ ID NO: 15484 - DNA, 21 bp, synthetic construct
  misc_feature 1..21: note = Synthetic construct
  source 1..21: mol_type = other DNA
ttagagctgatccattccgcg

SEQ ID NO: 15485 - DNA, 21 bp, synthetic construct
  misc_feature 1..21: note = Synthetic construct
  source 1..21: mol_type = other DNA
ttagagctgatccattcggcg

SEQ ID NO: 15486 - DNA, 21 bp, synthetic construct
  misc_feature 1..21: note = Synthetic construct
  source 1..21: mol_type = other DNA
ttagagctgatccattctgcg

SEQ ID NO: 15487 - DNA, 21 bp, synthetic construct
  misc_feature 1..21: note = Synthetic construct
  source 1..21: mol_type = other DNA
ttagagctgatccattcaacg

SEQ ID NO: 15488 - DNA, 21 bp, synthetic construct
  misc_feature 1..21: note = Synthetic construct
  source 1..21: mol_type = other DNA
ttagagctgatccattcaccg

SEQ ID NO: 15489 - DNA, 21 bp, synthetic construct
  misc_feature 1..21: note = Synthetic construct
  source 1..21: mol_type = other DNA
ttagagctgatccattcatcg

SEQ ID NO: 15490 - DNA, 21 bp, synthetic construct
  misc_feature 1..21: note = Synthetic construct
  source 1..21: mol_type = other DNA
ttagagctgatccattcagag

SEQ ID NO: 15491 - DNA, 21 bp, synthetic construct
  misc_feature 1..21: note = Synthetic construct
  source 1..21: mol_type = other DNA
ttagagctgatccattcaggg

SEQ ID NO: 15492 - DNA, 21 bp, synthetic construct
  misc_feature 1..21: note = Synthetic construct
  source 1..21: mol_type = other DNA
ttagagctgatccattcagtg

SEQ ID NO: 15493 - DNA, 21 bp, synthetic construct
  misc_feature 1..21: note = Synthetic construct
  source 1..21: mol_type = other DNA
ttagagctgatccattcagca

SEQ ID NO: 15494 - DNA, 21 bp, synthetic construct
  misc_feature 1..21: note = Synthetic construct
  source 1..21: mol_type = other DNA
ttagagctgatccattcagcc

SEQ ID NO: 15495 - DNA, 21 bp, synthetic construct
  misc_feature 1..21: note = Synthetic construct
  source 1..21: mol_type = other DNA
ttagagctgatccattcagct

SEQ ID NO: 15496 - DNA, 20 bp, synthetic construct
  misc_feature 1..20: note = Synthetic construct
  source 1..20: mol_type = other DNA
cgtatggaaccacgctatgt

SEQ ID NO: 15497 - DNA, 20 bp, synthetic construct
  misc_feature 1..20: note = Synthetic construct
  source 1..20: mol_type = other DNA
ggtatggaaccacgctatgt

SEQ ID NO: 15498 - DNA, 20 bp, synthetic construct
  misc_feature 1..20: note = Synthetic construct
  source 1..20: mol_type = other DNA
tgtatggaaccacgctatgt

SEQ ID NO: 15499 - DNA, 20 bp, synthetic construct
  misc_feature 1..20: note = Synthetic construct
  source 1..20: mol_type = other DNA
aatatggaaccacgctatgt

SEQ ID NO: 15500 - DNA, 20 bp, synthetic construct
  misc_feature 1..20: note = Synthetic construct
  source 1..20: mol_type = other DNA
actatggaaccacgctatgt

SEQ ID NO: 15501 - DNA, 20 bp, synthetic construct
  misc_feature 1..20: note = Synthetic construct
  source 1..20: mol_type = other DNA
attatggaaccacgctatgt

SEQ ID NO: 15502 - DNA, 20 bp, synthetic construct
  misc_feature 1..20: note = Synthetic construct
  source 1..20: mol_type = other DNA
agaatggaaccacgctatgt

SEQ ID NO: 15503 - DNA, 20 bp, synthetic construct
  misc_feature 1..20: note = Synthetic construct
  source 1..20: mol_type = other DNA
agcatggaaccacgctatgt

SEQ ID NO: 15504 - DNA, 20 bp, synthetic construct
  misc_feature 1..20: note = Synthetic construct
  source 1..20: mol_type = other DNA
aggatggaaccacgctatgt

SEQ ID NO: 15505 - DNA, 20 bp, synthetic construct
  misc_feature 1..20: note = Synthetic construct
  source 1..20: mol_type = other DNA
agtctggaaccacgctatgt

SEQ ID NO: 15506 - DNA, 20 bp, synthetic construct
  misc_feature 1..20: note = Synthetic construct
  source 1..20: mol_type = other DNA
agtgtggaaccacgctatgt

SEQ ID NO: 15507 - DNA, 20 bp, synthetic construct
  misc_feature 1..20: note = Synthetic construct
  source 1..20: mol_type = other DNA
agtttggaaccacgctatgt

SEQ ID NO: 15508 - DNA, 20 bp, synthetic construct
  misc_feature 1..20: note = Synthetic construct
  source 1..20: mol_type = other DNA
agtaaggaaccacgctatgt

SEQ ID NO: 15509 - DNA, 20 bp, synthetic construct
  misc_feature 1..20: note = Synthetic construct
  source 1..20: mol_type = other DNA
agtacggaaccacgctatgt

SEQ ID NO: 15510 - DNA, 20 bp, synthetic construct
  misc_feature 1..20: note = Synthetic construct
  source 1..20: mol_type = other DNA
agtagggaaccacgctatgt

SEQ ID NO: 15511 - DNA, 20 bp, synthetic construct
  misc_feature 1..20: note = Synthetic construct
  source 1..20: mol_type = other DNA
agtatagaaccacgctatgt

SEQ ID NO: 15512 - DNA, 20 bp, synthetic construct
  misc_feature 1..20: note = Synthetic construct
  source 1..20: mol_type = other DNA
agtatcgaaccacgctatgt

SEQ ID NO: 15513 - DNA, 20 bp, synthetic construct
  misc_feature 1..20: note = Synthetic construct
  source 1..20: mol_type = other DNA
agtattgaaccacgctatgt

SEQ ID NO: 15514 - DNA, 20 bp, synthetic construct
  misc_feature 1..20: note = Synthetic construct
  source 1..20: mol_type = other DNA
agtatgaaaccacgctatgt

SEQ ID NO: 15515 - DNA, 20 bp, synthetic construct
  misc_feature 1..20: note = Synthetic construct
  source 1..20: mol_type = other DNA
agtatgcaaccacgctatgt

SEQ ID NO: 15516 - DNA, 20 bp, synthetic construct
  misc_feature 1..20: note = Synthetic construct
  source 1..20: mol_type = other DNA
agtatgtaaccacgctatgt

SEQ ID NO: 15517 - DNA, 20 bp, synthetic construct
  misc_feature 1..20: note = Synthetic construct
  source 1..20: mol_type = other DNA
agtatggcaccacgctatgt

SEQ ID NO: 15518 - DNA, 20 bp, synthetic construct
  misc_feature 1..20: note = Synthetic construct
  source 1..20: mol_type = other DNA
agtatgggaccacgctatgt

SEQ ID NO: 15519 - DNA, 20 bp, synthetic construct
  misc_feature 1..20: note = Synthetic construct
  source 1..20: mol_type = other DNA
agtatggtaccacgctatgt

SEQ ID NO: 15520 - DNA, 20 bp, synthetic construct
  misc_feature 1..20: note = Synthetic construct
  source 1..20: mol_type = other DNA
agtatggacccacgctatgt

SEQ ID NO: 15521 - DNA, 20 bp, synthetic construct
  misc_feature 1..20: note = Synthetic construct
  source 1..20: mol_type = other DNA
agtatggagccacgctatgt

SEQ ID NO: 15522 - DNA, 20 bp, synthetic construct
  misc_feature 1..20: note = Synthetic construct
  source 1..20: mol_type = other DNA
agtatggatccacgctatgt

SEQ ID NO: 15523 - DNA, 20 bp, synthetic construct
  misc_feature 1..20: note = Synthetic construct
  source 1..20: mol_type = other DNA
agtatggaaacacgctatgt

SEQ ID NO: 15524 - DNA, 20 bp, synthetic construct
  misc_feature 1..20: note = Synthetic construct
  source 1..20: mol_type = other DNA
agtatggaagcacgctatgt

SEQ ID NO: 15525 - DNA, 20 bp, synthetic construct
  misc_feature 1..20: note = Synthetic construct
  source 1..20: mol_type = other DNA
agtatggaatcacgctatgt

SEQ ID NO: 15526 - DNA, 20 bp, synthetic construct
  misc_feature 1..20: note = Synthetic construct
  source 1..20: mol_type = other DNA
agtatggaacaacgctatgt

SEQ ID NO: 15527 - DNA, 20 bp, synthetic construct
  misc_feature 1..20: note = Synthetic construct
  source 1..20: mol_type = other DNA
agtatggaacgacgctatgt

SEQ ID NO: 15528 - DNA, 20 bp, synthetic construct
  misc_feature 1..20: note = Synthetic construct
  source 1..20: mol_type = other DNA
agtatggaactacgctatgt

SEQ ID NO: 15529 - DNA, 20 bp, synthetic construct
  misc_feature 1..20: note = Synthetic construct
  source 1..20: mol_type = other DNA
agtatggaaccccgctatgt

SEQ ID NO: 15530 - DNA, 20 bp, synthetic construct
  misc_feature 1..20: note = Synthetic construct
  source 1..20: mol_type = other DNA
agtatggaaccgcgctatgt

SEQ ID NO: 15531 - DNA, 20 bp, synthetic construct
  misc_feature 1..20: note = Synthetic construct
  source 1..20: mol_type = other DNA
agtatggaacctcgctatgt

SEQ ID NO: 15532 - DNA, 20 bp, synthetic construct
  misc_feature 1..20: note = Synthetic construct
  source 1..20: mol_type = other DNA
agtatggaaccaagctatgt

SEQ ID NO: 15533 - DNA, 20 bp, synthetic construct
  misc_feature 1..20: note = Synthetic construct
  source 1..20: mol_type = other DNA
agtatggaaccaggctatgt

SEQ ID NO: 15534 - DNA, 20 bp, synthetic construct
  misc_feature 1..20: note = Synthetic construct
  source 1..20: mol_type = other DNA
agtatggaaccatgctatgt

SEQ ID NO: 15535 - DNA, 20 bp, synthetic construct
  misc_feature 1..20: note = Synthetic construct
  source 1..20: mol_type = other DNA
agtatggaaccacactatgt

SEQ ID NO: 15536 - DNA, 20 bp, synthetic construct
  misc_feature 1..20: note = Synthetic construct
  source 1..20: mol_type = other DNA
agtatggaaccaccctatgt

SEQ ID NO: 15537 - DNA, 20 bp, synthetic construct
  misc_feature 1..20: note = Synthetic construct
  source 1..20: mol_type = other DNA
agtatggaaccactctatgt

SEQ ID NO: 15538 - DNA, 20 bp, synthetic construct
  misc_feature 1..20: note = Synthetic construct
  source 1..20: mol_type = other DNA
agtatggaaccacgatatgt

SEQ ID NO: 15539 - DNA, 20 bp, synthetic construct
  misc_feature 1..20: note = Synthetic construct
  source 1..20: mol_type = other DNA
agtatggaaccacggtatgt

SEQ ID NO: 15540 - DNA, 20 bp, synthetic construct
  misc_feature 1..20: note = Synthetic construct
  source 1..20: mol_type = other DNA
agtatggaaccacgttatgt

SEQ ID NO: 15541 - DNA, 20 bp, synthetic construct
  misc_feature 1..20: note = Synthetic construct
  source 1..20: mol_type = other DNA
agtatggaaccacgcaatgt

SEQ ID NO: 15542 - DNA, 20 bp, synthetic construct
  misc_feature 1..20: note = Synthetic construct
  source 1..20: mol_type = other DNA
agtatggaaccacgccatgt

SEQ ID NO: 15543 - DNA, 20 bp, synthetic construct
  misc_feature 1..20: note = Synthetic construct
  source 1..20: mol_type = other DNA
agtatggaaccacgcgatgt

SEQ ID NO: 15544 - DNA, 20 bp, synthetic construct
  misc_feature 1..20: note = Synthetic construct
  source 1..20: mol_type = other DNA
agtatggaaccacgctctgt

SEQ ID NO: 15545 - DNA, 20 bp, synthetic construct
  misc_feature 1..20: note = Synthetic construct
  source 1..20: mol_type = other DNA
agtatggaaccacgctgtgt

SEQ ID NO: 15546 - DNA, 20 bp, synthetic construct
  misc_feature 1..20: note = Synthetic construct
  source 1..20: mol_type = other DNA
agtatggaaccacgctttgt

SEQ ID NO: 15547 - DNA, 20 bp, synthetic construct
  misc_feature 1..20: note = Synthetic construct
  source 1..20: mol_type = other DNA
agtatggaaccacgctaagt

SEQ ID NO: 15548 - DNA, 20 bp, synthetic construct
  misc_feature 1..20: note = Synthetic construct
  source 1..20: mol_type = other DNA
agtatggaaccacgctacgt

SEQ ID NO: 15549 - DNA, 20 bp, synthetic construct
  misc_feature 1..20: note = Synthetic construct
  source 1..20: mol_type = other DNA
agtatggaaccacgctaggt

SEQ ID NO: 15550 - DNA, 20 bp, synthetic construct
  misc_feature 1..20: note = Synthetic construct
  source 1..20: mol_type = other DNA
agtatggaaccacgctatat

SEQ ID NO: 15551 - DNA, 20 bp, synthetic construct
  misc_feature 1..20: note = Synthetic construct
  source 1..20: mol_type = other DNA
agtatggaaccacgctatct

SEQ ID NO: 15552 - DNA, 20 bp, synthetic construct
  misc_feature 1..20: note = Synthetic construct
  source 1..20: mol_type = other DNA
agtatggaaccacgctattt

SEQ ID NO: 15553 - DNA, 20 bp, synthetic construct
  misc_feature 1..20: note = Synthetic construct
  source 1..20: mol_type = other DNA
agtatggaaccacgctatga

SEQ ID NO: 15554 - DNA, 20 bp, synthetic construct
  misc_feature 1..20: note = Synthetic construct
  source 1..20: mol_type = other DNA
agtatggaaccacgctatgc

SEQ ID NO: 15555 - DNA, 20 bp, synthetic construct
  misc_feature 1..20: note = Synthetic construct
  source 1..20: mol_type = other DNA
agtatggaaccacgctatgg

SEQ ID NO: 15556 - DNA, 22 bp, synthetic construct
  misc_feature 1..22: note = Synthetic construct
  source 1..22: mol_type = other DNA
ccggatgctggtttgtaaaaca

SEQ ID NO: 15557 - DNA, 22 bp, synthetic construct
  misc_feature 1..22: note = Synthetic construct
  source 1..22: mol_type = other DNA
gcggatgctggtttgtaaaaca

SEQ ID NO: 15558 - DNA, 22 bp, synthetic construct
  misc_feature 1..22: note = Synthetic construct
  source 1..22: mol_type = other DNA
tcggatgctggtttgtaaaaca

SEQ ID NO: 15559 - DNA, 22 bp, synthetic construct
  misc_feature 1..22: note = Synthetic construct
  source 1..22: mol_type = other DNA
aaggatgctggtttgtaaaaca

SEQ ID NO: 15560 - DNA, 22 bp, synthetic construct
  misc_feature 1..22: note = Synthetic construct
  source 1..22: mol_type = other DNA
agggatgctggtttgtaaaaca

SEQ ID NO: 15561 - DNA, 22 bp, synthetic construct
  misc_feature 1..22: note = Synthetic construct
  source 1..22: mol_type = other DNA
atggatgctggtttgtaaaaca

SEQ ID NO: 15562 - DNA, 22 bp, synthetic construct
  misc_feature 1..22: note = Synthetic construct
  source 1..22: mol_type = other DNA
acagatgctggtttgtaaaaca

SEQ ID NO: 15563 - DNA, 22 bp, synthetic construct
  misc_feature 1..22: note = Synthetic construct
  source 1..22: mol_type = other DNA
accgatgctggtttgtaaaaca

SEQ ID NO: 15564 - DNA, 22 bp, synthetic construct
  misc_feature 1..22: note = Synthetic construct
  source 1..22: mol_type = other DNA
actgatgctggtttgtaaaaca

SEQ ID NO: 15565 - DNA, 22 bp, synthetic construct
  misc_feature 1..22: note = Synthetic construct
  source 1..22: mol_type = other DNA
acgaatgctggtttgtaaaaca

SEQ ID NO: 15566 - DNA, 22 bp, synthetic construct
  misc_feature 1..22: note = Synthetic construct
  source 1..22: mol_type = other DNA
acgcatgctggtttgtaaaaca

SEQ ID NO: 15567 - DNA, 22 bp, synthetic construct
  misc_feature 1..22: note = Synthetic construct
  source 1..22: mol_type = other DNA
acgtatgctggtttgtaaaaca

SEQ ID NO: 15568 - DNA, 22 bp, synthetic construct
  misc_feature 1..22: note = Synthetic construct
  source 1..22: mol_type = other DNA
acggctgctggtttgtaaaaca

SEQ ID NO: 15569 - DNA, 22 bp, synthetic construct
  misc_feature 1..22: note = Synthetic construct
  source 1..22: mol_type = other DNA
acgggtgctggtttgtaaaaca

SEQ ID NO: 15570 - DNA, 22 bp, synthetic construct
  misc_feature 1..22: note = Synthetic construct
  source 1..22: mol_type = other DNA
acggttgctggtttgtaaaaca

SEQ ID NO: 15571 - DNA, 22 bp, synthetic construct
  misc_feature 1..22: note = Synthetic construct
  source 1..22: mol_type = other DNA
acggaagctggtttgtaaaaca

SEQ ID NO: 15572 - DNA, 22 bp, synthetic construct
  misc_feature 1..22: note = Synthetic construct
  source 1..22: mol_type = other DNA
acggacgctggtttgtaaaaca

SEQ ID NO: 15573 - DNA, 22 bp, synthetic construct
  misc_feature 1..22: note = Synthetic construct
  source 1..22: mol_type = other DNA
acggaggctggtttgtaaaaca

SEQ ID NO: 15574 - DNA, 22 bp, synthetic construct
  misc_feature 1..22: note = Synthetic construct
  source 1..22: mol_type = other DNA
acggatactggtttgtaaaaca

SEQ ID NO: 15575 - DNA, 22 bp, synthetic construct
  misc_feature 1..22: note = Synthetic construct
  source 1..22: mol_type = other DNA
acggatcctggtttgtaaaaca

SEQ ID NO: 15576 - DNA, 22 bp, synthetic construct
  misc_feature 1..22: note = Synthetic construct
  source 1..22: mol_type = other DNA
acggattctggtttgtaaaaca

SEQ ID NO: 15577 - DNA, 22 bp, synthetic construct
  misc_feature 1..22: note = Synthetic construct
  source 1..22: mol_type = other DNA
acggatgatggtttgtaaaaca

SEQ ID NO: 15578 - DNA, 22 bp, synthetic construct
  misc_feature 1..22: note = Synthetic construct
  source 1..22: mol_type = other DNA
acggatggtggtttgtaaaaca

SEQ ID NO: 15579 - DNA, 22 bp, synthetic construct
  misc_feature 1..22: note = Synthetic construct
  source 1..22: mol_type = other DNA
acggatgttggtttgtaaaaca

SEQ ID NO: 15580 - DNA, 22 bp, synthetic construct
  misc_feature 1..22: note = Synthetic construct
  source 1..22: mol_type = other DNA
acggatgcaggtttgtaaaaca

SEQ ID NO: 15581 - DNA, 22 bp, synthetic construct
  misc_feature 1..22: note = Synthetic construct
  source 1..22: mol_type = other DNA
acggatgccggtttgtaaaaca

SEQ ID NO: 15582 - DNA, 22 bp, synthetic construct
  misc_feature 1..22: note = Synthetic construct
  source 1..22: mol_type = other DNA
acggatgcgggtttgtaaaaca

SEQ ID NO: 15583 - DNA, 22 bp, synthetic construct
  misc_feature 1..22: note = Synthetic construct
  source 1..22: mol_type = other DNA
acggatgctagtttgtaaaaca

SEQ ID NO: 15584 - DNA, 22 bp, synthetic construct
  misc_feature 1..22: note = Synthetic construct
  source 1..22: mol_type = other DNA
acggatgctcgtttgtaaaaca

SEQ ID NO: 15585 - DNA, 22 bp, synthetic construct
  misc_feature 1..22: note = Synthetic construct
  source 1..22: mol_type = other DNA
acggatgcttgtttgtaaaaca

SEQ ID NO: 15586 - DNA, 22 bp, synthetic construct
  misc_feature 1..22: note = Synthetic construct
  source 1..22: mol_type = other DNA
acggatgctgatttgtaaaaca

SEQ ID NO: 15587 - DNA, 22 bp, synthetic construct
  misc_feature 1..22: note = Synthetic construct
  source 1..22: mol_type = other DNA
acggatgctgctttgtaaaaca

SEQ ID NO: 15588 - DNA, 22 bp, synthetic construct
  misc_feature 1..22: note = Synthetic construct
  source 1..22: mol_type = other DNA
acggatgctgttttgtaaaaca

SEQ ID NO: 15589 - DNA, 22 bp, synthetic construct
  misc_feature 1..22: note = Synthetic construct
  source 1..22: mol_type = other DNA
acggatgctggattgtaaaaca

SEQ ID NO: 15590 - DNA, 22 bp, synthetic construct
  misc_feature 1..22: note = Synthetic construct
  source 1..22: mol_type = other DNA
acggatgctggcttgtaaaaca

SEQ ID NO: 15591 - DNA, 22 bp, synthetic construct
  misc_feature 1..22: note = Synthetic construct
  source 1..22: mol_type = other DNA
acggatgctgggttgtaaaaca

SEQ ID NO: 15592 - DNA, 22 bp, synthetic construct
  misc_feature 1..22: note = Synthetic construct
  source 1..22: mol_type = other DNA
acggatgctggtatgtaaaaca

SEQ ID NO: 15593 - DNA, 22 bp, synthetic construct
  misc_feature 1..22: note = Synthetic construct
  source 1..22: mol_type = other DNA
acggatgctggtctgtaaaaca

SEQ ID NO: 15594 - DNA, 22 bp, synthetic construct
  misc_feature 1..22: note = Synthetic construct
  source 1..22: mol_type = other DNA
acggatgctggtgtgtaaaaca

SEQ ID NO: 15595 - DNA, 22 bp, synthetic construct
  misc_feature 1..22: note = Synthetic construct
  source 1..22: mol_type = other DNA
acggatgctggttagtaaaaca

SEQ ID NO: 15596 - DNA, 22 bp, synthetic construct
  misc_feature 1..22: note = Synthetic construct
  source 1..22: mol_type = other DNA
acggatgctggttcgtaaaaca

SEQ ID NO: 15597 - DNA, 22 bp, synthetic construct
  misc_feature 1..22: note = Synthetic construct
  source 1..22: mol_type = other DNA
acggatgctggttggtaaaaca

SEQ ID NO: 15598 - DNA, 22 bp, synthetic construct
  misc_feature 1..22: note = Synthetic construct
  source 1..22: mol_type = other DNA
acggatgctggtttataaaaca

SEQ ID NO: 15599 - DNA, 22 bp, synthetic construct
  misc_feature 1..22: note = Synthetic construct
  source 1..22: mol_type = other DNA
acggatgctggtttctaaaaca

SEQ ID NO: 15600 - DNA, 22 bp, synthetic construct
  misc_feature 1..22: note = Synthetic construct
  source 1..22: mol_type = other DNA
acggatgctggtttttaaaaca

SEQ ID NO: 15601 - DNA, 22 bp, synthetic construct
  misc_feature 1..22: note = Synthetic construct
  source 1..22: mol_type = other DNA
acggatgctggtttgaaaaaca

SEQ ID NO: 15602 - DNA, 22 bp, synthetic construct
  misc_feature 1..22: note = Synthetic construct
  source 1..22: mol_type = other DNA
acggatgctggtttgcaaaaca

SEQ ID NO: 15603 - DNA, 22 bp, synthetic construct
  misc_feature 1..22: note = Synthetic construct
  source 1..22: mol_type = other DNA
acggatgctggtttggaaaaca

SEQ ID NO: 15604 - DNA, 22 bp, synthetic construct
  misc_feature 1..22: note = Synthetic construct
  source 1..22: mol_type = other DNA
acggatgctggtttgtcaaaca

SEQ ID NO: 15605 - DNA, 22 bp, synthetic construct
  misc_feature 1..22: note = Synthetic construct
  source 1..22: mol_type = other DNA
acggatgctggtttgtgaaaca

SEQ ID NO: 15606 - DNA, 22 bp, synthetic construct
  misc_feature 1..22: note = Synthetic construct
  source 1..22: mol_type = other DNA
acggatgctggtttgttaaaca

SEQ ID NO: 15607 - DNA, 22 bp, synthetic construct
  misc_feature 1..22: note = Synthetic construct
  source 1..22: mol_type = other DNA
acggatgctggtttgtacaaca

SEQ ID NO: 15608 - DNA, 22 bp, synthetic construct
  misc_feature 1..22: note = Synthetic construct
  source 1..22: mol_type = other DNA
acggatgctggtttgtagaaca

SEQ ID NO: 15609 - DNA, 22 bp, synthetic construct
  misc_feature 1..22: note = Synthetic construct
  source 1..22: mol_type = other DNA
acggatgctggtttgtataaca

SEQ ID NO: 15610 - DNA, 22 bp, synthetic construct
  misc_feature 1..22: note = Synthetic construct
  source 1..22: mol_type = other DNA
acggatgctggtttgtaacaca

SEQ ID NO: 15611 - DNA, 22 bp, synthetic construct
  misc_feature 1..22: note = Synthetic construct
  source 1..22: mol_type = other DNA
acggatgctggtttgtaagaca

SEQ ID NO: 15612 - DNA, 22 bp, synthetic construct
  misc_feature 1..22: note = Synthetic construct
  source 1..22: mol_type = other DNA
acggatgctggtttgtaataca

SEQ ID NO: 15613 - DNA, 22 bp, synthetic construct
  misc_feature 1..22: note = Synthetic construct
  source 1..22: mol_type = other DNA
acggatgctggtttgtaaacca

SEQ ID NO: 15614 - DNA, 22 bp, synthetic construct
  misc_feature 1..22: note = Synthetic construct
  source 1..22: mol_type = other DNA
acggatgctggtttgtaaagca

SEQ ID NO: 15615 - DNA, 22 bp, synthetic construct
  misc_feature 1..22: note = Synthetic construct
  source 1..22: mol_type = other DNA
acggatgctggtttgtaaatca

SEQ ID NO: 15616 - DNA, 22 bp, synthetic construct
  misc_feature 1..22: note = Synthetic construct
  source 1..22: mol_type = other DNA
acggatgctggtttgtaaaaaa

SEQ ID NO: 15617 - DNA, 22 bp, synthetic construct
  misc_feature 1..22: note = Synthetic construct
  source 1..22: mol_type = other DNA
acggatgctggtttgtaaaaga

SEQ ID NO: 15618 - DNA, 22 bp, synthetic construct
  misc_feature 1..22: note = Synthetic construct
  source 1..22: mol_type = other DNA
acggatgctggtttgtaaaata

SEQ ID NO: 15619 - DNA, 22 bp, synthetic construct
  misc_feature 1..22: note = Synthetic construct
  source 1..22: mol_type = other DNA
acggatgctggtttgtaaaacc

SEQ ID NO: 15620 - DNA, 22 bp, synthetic construct
  misc_feature 1..22: note = Synthetic construct
  source 1..22: mol_type = other DNA
acggatgctggtttgtaaaacg

SEQ ID NO: 15621 - DNA, 22 bp, synthetic construct
  misc_feature 1..22: note = Synthetic construct
  source 1..22: mol_type = other DNA
acggatgctggtttgtaaaact

SEQ ID NO: 15622 - DNA, 21 bp, synthetic construct
  misc_feature 1..21: note = Synthetic construct
  source 1..21: mol_type = other DNA
actaacgcatctaaggtatgg

SEQ ID NO: 15623 - DNA, 21 bp, synthetic construct
  misc_feature 1..21: note = Synthetic construct
  source 1..21: mol_type = other DNA
cctaacgcatctaaggtatgg

SEQ ID NO: 15624 - DNA, 21 bp, synthetic construct
  misc_feature 1..21: note = Synthetic construct
  source 1..21: mol_type = other DNA
tctaacgcatctaaggtatgg

SEQ ID NO: 15625 - DNA, 21 bp, synthetic construct
  misc_feature 1..21: note = Synthetic construct
  source 1..21: mol_type = other DNA
gataacgcatctaaggtatgg

SEQ ID NO: 15626 - DNA, 21 bp, synthetic construct
  misc_feature 1..21: note = Synthetic construct
  source 1..21: mol_type = other DNA
ggtaacgcatctaaggtatgg

SEQ ID NO: 15627 - DNA, 21 bp, synthetic construct
  misc_feature 1..21: note = Synthetic construct
  source 1..21: mol_type = other DNA
gttaacgcatctaaggtatgg

SEQ ID NO: 15628 - DNA, 21 bp, synthetic construct
  misc_feature 1..21: note = Synthetic construct
  source 1..21: mol_type = other DNA
gcaaacgcatctaaggtatgg

SEQ ID NO: 15629 - DNA, 21 bp, synthetic construct
  misc_feature 1..21: note = Synthetic construct
  source 1..21: mol_type = other DNA
gccaacgcatctaaggtatgg

SEQ ID NO: 15630 - DNA, 21 bp, synthetic construct
  misc_feature 1..21: note = Synthetic construct
  source 1..21: mol_type = other DNA
gcgaacgcatctaaggtatgg

SEQ ID NO: 15631 - DNA, 21 bp, synthetic construct
  misc_feature 1..21: note = Synthetic construct
  source 1..21: mol_type = other DNA
gctcacgcatctaaggtatgg

SEQ ID NO: 15632 - DNA, 21 bp, synthetic construct
  misc_feature 1..21: note = Synthetic construct
  source 1..21: mol_type = other DNA
gctgacgcatctaaggtatgg

SEQ ID NO: 15633 - DNA, 21 bp, synthetic construct
  misc_feature 1..21: note = Synthetic construct
  source 1..21: mol_type = other DNA
gcttacgcatctaaggtatgg

SEQ ID NO: 15634 - DNA, 21 bp, synthetic construct
  misc_feature 1..21: note = Synthetic construct
  source 1..21: mol_type = other DNA
gctaccgcatctaaggtatgg

SEQ ID NO: 15635 - DNA, 21 bp, synthetic construct
  misc_feature 1..21: note = Synthetic construct
  source 1..21: mol_type = other DNA
gctagcgcatctaaggtatgg

SEQ ID NO: 15636 - DNA, 21 bp, synthetic construct
  misc_feature 1..21: note = Synthetic construct
  source 1..21: mol_type = other DNA
gctatcgcatctaaggtatgg

SEQ ID NO: 15637 - DNA, 21 bp, synthetic construct
  misc_feature 1..21: note = Synthetic construct
  source 1..21: mol_type = other DNA
gctaaagcatctaaggtatgg

SEQ ID NO: 15638 - DNA, 21 bp, synthetic construct
  misc_feature 1..21: note = Synthetic construct
  source 1..21: mol_type = other DNA
gctaaggcatctaaggtatgg

SEQ ID NO: 15639 - DNA, 21 bp, synthetic construct
  misc_feature 1..21: note = Synthetic construct
  source 1..21: mol_type = other DNA
gctaatgcatctaaggtatgg

SEQ ID NO: 15640 - DNA, 21 bp, synthetic construct
  misc_feature 1..21: note = Synthetic construct
  source 1..21: mol_type = other DNA
gctaacacatctaaggtatgg

SEQ ID NO: 15641 - DNA, 21 bp, synthetic construct
  misc_feature 1..21: note = Synthetic construct
  source 1..21: mol_type = other DNA
gctaacccatctaaggtatgg

SEQ ID NO: 15642 - DNA, 21 bp, synthetic construct
  misc_feature 1..21: note = Synthetic construct
  source 1..21: mol_type = other DNA
gctaactcatctaaggtatgg

SEQ ID NO: 15643 - DNA, 21 bp, synthetic construct
  misc_feature 1..21: note = Synthetic construct
  source 1..21: mol_type = other DNA
gctaacgaatctaaggtatgg

SEQ ID NO: 15644 - DNA, 21 bp, synthetic construct
  misc_feature 1..21: note = Synthetic construct
  source 1..21: mol_type = other DNA
gctaacggatctaaggtatgg

SEQ ID NO: 15645 - DNA, 21 bp, synthetic construct
  misc_feature 1..21: note = Synthetic construct
  source 1..21: mol_type = other DNA
gctaacgtatctaaggtatgg

SEQ ID NO: 15646 - DNA, 21 bp, synthetic construct
  misc_feature 1..21: note = Synthetic construct
  source 1..21: mol_type = other DNA
gctaacgcctctaaggtatgg

SEQ ID NO: 15647 - DNA, 21 bp, synthetic construct
  misc_feature 1..21: note = Synthetic construct
  source 1..21: mol_type = other DNA
gctaacgcgtctaaggtatgg

SEQ ID NO: 15648 - DNA, 21 bp, synthetic construct
  misc_feature 1..21: note = Synthetic construct
  source 1..21: mol_type = other DNA
gctaacgcttctaaggtatgg

SEQ ID NO: 15649 - DNA, 21 bp, synthetic construct
  misc_feature 1..21: note = Synthetic construct
  source 1..21: mol_type = other DNA
gctaacgcaactaaggtatgg

SEQ ID NO: 15650 - DNA, 21 bp, synthetic construct
  misc_feature 1..21: note = Synthetic construct
  source 1..21: mol_type = other DNA
gctaacgcacctaaggtatgg

SEQ ID NO: 15651 - DNA, 21 bp, synthetic construct
  misc_feature 1..21: note = Synthetic construct
  source 1..21: mol_type = other DNA
gctaacgcagctaaggtatgg

SEQ ID NO: 15652 - DNA, 21 bp, synthetic construct
  misc_feature 1..21: note = Synthetic construct
  source 1..21: mol_type = other DNA
gctaacgcatataaggtatgg

SEQ ID NO: 15653 - DNA, 21 bp, synthetic construct
  misc_feature 1..21: note = Synthetic construct
  source 1..21: mol_type = other DNA
gctaacgcatgtaaggtatgg

SEQ ID NO: 15654 - DNA, 21 bp, synthetic construct
  misc_feature 1..21: note = Synthetic construct
  source 1..21: mol_type = other DNA
gctaacgcatttaaggtatgg

SEQ ID NO: 15655 - DNA, 21 bp, synthetic construct
  misc_feature 1..21: note = Synthetic construct
  source 1..21: mol_type = other DNA
gctaacgcatcaaaggtatgg

SEQ ID NO: 15656 - DNA, 21 bp, synthetic construct
  misc_feature 1..21: note = Synthetic construct
  source 1..21: mol_type = other DNA
gctaacgcatccaaggtatgg

SEQ ID NO: 15657 - DNA, 21 bp, synthetic construct
  misc_feature 1..21: note = Synthetic construct
  source 1..21: mol_type = other DNA
gctaacgcatcgaaggtatgg

SEQ ID NO: 15658 - DNA, 21 bp, synthetic construct
  misc_feature 1..21: note = Synthetic construct
  source 1..21: mol_type = other DNA
gctaacgcatctcaggtatgg

SEQ ID NO: 15659 - DNA, 21 bp, synthetic construct
  misc_feature 1..21: note = Synthetic construct
  source 1..21: mol_type = other DNA
gctaacgcatctgaggtatgg

SEQ ID NO: 15660 - DNA, 21 bp, synthetic construct
  misc_feature 1..21: note = Synthetic construct
  source 1..21: mol_type = other DNA
gctaacgcatcttaggtatgg

SEQ ID NO: 15661 - DNA, 21 bp, synthetic construct
  misc_feature 1..21: note = Synthetic construct
  source 1..21: mol_type = other DNA
gctaacgcatctacggtatgg

SEQ ID NO: 15662 - DNA, 21 bp, synthetic construct
  misc_feature 1..21: note = Synthetic construct
  source 1..21: mol_type = other DNA
gctaacgcatctagggtatgg

SEQ ID NO: 15663 - DNA, 21 bp, synthetic construct
  misc_feature 1..21: note = Synthetic construct
  source 1..21: mol_type = other DNA
gctaacgcatctatggtatgg

SEQ ID NO: 15664 - DNA, 21 bp, synthetic construct
  misc_feature 1..21: note = Synthetic construct
  source 1..21: mol_type = other DNA
gctaacgcatctaaagtatgg

SEQ ID NO: 15665 - DNA, 21 bp, synthetic construct
  misc_feature 1..21: note = Synthetic construct
  source 1..21: mol_type = other DNA
gctaacgcatctaacgtatgg

SEQ ID NO: 15666 - DNA, 21 bp, synthetic construct
  misc_feature 1..21: note = Synthetic construct
  source 1..21: mol_type = other DNA
gctaacgcatctaatgtatgg

SEQ ID NO: 15667 - DNA, 21 bp, synthetic construct
  misc_feature 1..21: note = Synthetic construct
  source 1..21: mol_type = other DNA
gctaacgcatctaagatatgg

SEQ ID NO: 15668 - DNA, 21 bp, synthetic construct
  misc_feature 1..21: note = Synthetic construct
  source 1..21: mol_type = other DNA
gctaacgcatctaagctatgg

SEQ ID NO: 15669 - DNA, 21 bp, synthetic construct
  misc_feature 1..21: note = Synthetic construct
  source 1..21: mol_type = other DNA
gctaacgcatctaagttatgg

SEQ ID NO: 15670 - DNA, 21 bp, synthetic construct
  misc_feature 1..21: note = Synthetic construct
  source 1..21: mol_type = other DNA
gctaacgcatctaaggaatgg

SEQ ID NO: 15671 - DNA, 21 bp, synthetic construct
  misc_feature 1..21: note = Synthetic construct
  source 1..21: mol_type = other DNA
gctaacgcatctaaggcatgg

SEQ ID NO: 15672 - DNA, 21 bp, synthetic construct
  misc_feature 1..21: note = Synthetic construct
  source 1..21: mol_type = other DNA
gctaacgcatctaagggatgg

SEQ ID NO: 15673 - DNA, 21 bp, synthetic construct
  misc_feature 1..21: note = Synthetic construct
  source 1..21: mol_type = other DNA
gctaacgcatctaaggtctgg

SEQ ID NO: 15674 - DNA, 21 bp, synthetic construct
  misc_feature 1..21: note = Synthetic construct
  source 1..21: mol_type = other DNA
gctaacgcatctaaggtgtgg

SEQ ID NO: 15675 - DNA, 21 bp, synthetic construct
  misc_feature 1..21: note = Synthetic construct
  source 1..21: mol_type = other DNA
gctaacgcatctaaggtttgg

SEQ ID NO: 15676 - DNA, 21 bp, synthetic construct
  misc_feature 1..21: note = Synthetic construct
  source 1..21: mol_type = other DNA
gctaacgcatctaaggtaagg

SEQ ID NO: 15677 - DNA, 21 bp, synthetic construct
  misc_feature 1..21: note = Synthetic construct
  source 1..21: mol_type = other DNA
gctaacgcatctaaggtacgg

SEQ ID NO: 15678 - DNA, 21 bp, synthetic construct
  misc_feature 1..21: note = Synthetic construct
  source 1..21: mol_type = other DNA
gctaacgcatctaaggtaggg

SEQ ID NO: 15679 - DNA, 21 bp, synthetic construct
  misc_feature 1..21: note = Synthetic construct
  source 1..21: mol_type = other DNA
gctaacgcatctaaggtatag

SEQ ID NO: 15680 - DNA, 21 bp, synthetic construct
  misc_feature 1..21: note = Synthetic construct
  source 1..21: mol_type = other DNA
gctaacgcatctaaggtatcg

SEQ ID NO: 15681 - DNA, 21 bp, synthetic construct
  misc_feature 1..21: note = Synthetic construct
  source 1..21: mol_type = other DNA
gctaacgcatctaaggtattg

SEQ ID NO: 15682 - DNA, 21 bp, synthetic construct
  misc_feature 1..21: note = Synthetic construct
  source 1..21: mol_type = other DNA
gctaacgcatctaaggtatga

SEQ ID NO: 15683 - DNA, 21 bp, synthetic construct
  misc_feature 1..21: note = Synthetic construct
  source 1..21: mol_type = other DNA
gctaacgcatctaaggtatgc

SEQ ID NO: 15684 - DNA, 21 bp, synthetic construct
  misc_feature 1..21: note = Synthetic construct
  source 1..21: mol_type = other DNA
gctaacgcatctaaggtatgt

SEQ ID NO: 15685 - DNA, 21 bp, synthetic construct
  misc_feature 1..21: note = Synthetic construct
  source 1..21: mol_type = other DNA
ccggttgcttgttcagcgaac

SEQ ID NO: 15686 - DNA, 21 bp, synthetic construct
  misc_feature 1..21: note = Synthetic construct
  source 1..21: mol_type = other DNA
gcggttgcttgttcagcgaac

SEQ ID NO: 15687 - DNA, 21 bp, synthetic construct
  misc_feature 1..21: note = Synthetic construct
  source 1..21: mol_type = other DNA
tcggttgcttgttcagcgaac

SEQ ID NO: 15688 - DNA, 21 bp, synthetic construct
  misc_feature 1..21: note = Synthetic construct
  source 1..21: mol_type = other DNA
aaggttgcttgttcagcgaac

SEQ ID NO: 15689 - DNA, 21 bp, synthetic construct
  misc_feature 1..21: note = Synthetic construct
  source 1..21: mol_type = other DNA
agggttgcttgttcagcgaac

SEQ ID NO: 15690 - DNA, 21 bp, synthetic construct
  misc_feature 1..21: note = Synthetic construct
  source 1..21: mol_type = other DNA
atggttgcttgttcagcgaac

SEQ ID NO: 15691 - DNA, 21 bp, synthetic construct
  misc_feature 1..21: note = Synthetic construct
  source 1..21: mol_type = other DNA
acagttgcttgttcagcgaac

SEQ ID NO: 15692 - DNA, 21 bp, synthetic construct
  misc_feature 1..21: note = Synthetic construct
  source 1..21: mol_type = other DNA
accgttgcttgttcagcgaac

SEQ ID NO: 15693 - DNA, 21 bp, synthetic construct
  misc_feature 1..21: note = Synthetic construct
  source 1..21: mol_type = other DNA
actgttgcttgttcagcgaac

SEQ ID NO: 15694 - DNA, 21 bp, synthetic construct
  misc_feature 1..21: note = Synthetic construct
  source 1..21: mol_type = other DNA
acgattgcttgttcagcgaac

SEQ ID NO: 15695 - DNA, 21 bp, synthetic construct
  misc_feature 1..21: note = Synthetic construct
  source 1..21: mol_type = other DNA
acgcttgcttgttcagcgaac

SEQ ID NO: 15696 - DNA, 21 bp, synthetic construct
  misc_feature 1..21: note = Synthetic construct
  source 1..21: mol_type = other DNA
acgtttgcttgttcagcgaac

SEQ ID NO: 15697 - DNA, 21 bp, synthetic construct
  misc_feature 1..21: note = Synthetic construct
  source 1..21: mol_type = other DNA
acggatgcttgttcagcgaac

SEQ ID NO: 15698 - DNA, 21 bp, synthetic construct
  misc_feature 1..21: note = Synthetic construct
  source 1..21: mol_type = other DNA
acggctgcttgttcagcgaac

SEQ ID NO: 15699 - DNA, 21 bp, synthetic construct
  misc_feature 1..21: note = Synthetic construct
  source 1..21: mol_type = other DNA
acgggtgcttgttcagcgaac

SEQ ID NO: 15700 - DNA, 21 bp, synthetic construct
  misc_feature 1..21: note = Synthetic construct
  source 1..21: mol_type = other DNA
acggtagcttgttcagcgaac

SEQ ID NO: 15701 - DNA, 21 bp, synthetic construct
  misc_feature 1..21: note = Synthetic construct
  source 1..21: mol_type = other DNA
acggtcgcttgttcagcgaac

SEQ ID NO: 15702 - DNA, 21 bp, synthetic construct
  misc_feature 1..21: note = Synthetic construct
  source 1..21: mol_type = other DNA
acggtggcttgttcagcgaac

SEQ ID NO: 15703 - DNA, 21 bp, synthetic construct
  misc_feature 1..21: note = Synthetic construct
  source 1..21: mol_type = other DNA
acggttacttgttcagcgaac

SEQ ID NO: 15704 - DNA, 21 bp, synthetic construct
  misc_feature 1..21: note = Synthetic construct
  source 1..21: mol_type = other DNA
acggttccttgttcagcgaac

SEQ ID NO: 15705 - DNA, 21 bp, synthetic construct
  misc_feature 1..21: note = Synthetic construct
  source 1..21: mol_type = other DNA
acggtttcttgttcagcgaac

SEQ ID NO: 15706 - DNA, 21 bp, synthetic construct
  misc_feature 1..21: note = Synthetic construct
  source 1..21: mol_type = other DNA
acggttgattgttcagcgaac

SEQ ID NO: 15707 - DNA, 21 bp, synthetic construct
  misc_feature 1..21: note = Synthetic construct
  source 1..21: mol_type = other DNA
acggttggttgttcagcgaac

SEQ ID NO: 15708 - DNA, 21 bp, synthetic construct
  misc_feature 1..21: note = Synthetic construct
  source 1..21: mol_type = other DNA
acggttgtttgttcagcgaac

SEQ ID NO: 15709 - DNA, 21 bp, synthetic construct
  misc_feature 1..21: note = Synthetic construct
  source 1..21: mol_type = other DNA
acggttgcatgttcagcgaac

SEQ ID NO: 15710 - DNA, 21 bp, synthetic construct
  misc_feature 1..21: note = Synthetic construct
  source 1..21: mol_type = other DNA
acggttgcctgttcagcgaac

SEQ ID NO: 15711 - DNA, 21 bp, synthetic construct
  misc_feature 1..21: note = Synthetic construct
  source 1..21: mol_type = other DNA
acggttgcgtgttcagcgaac

SEQ ID NO: 15712 - DNA, 21 bp, synthetic construct
  misc_feature 1..21: note = Synthetic construct
  source 1..21: mol_type = other DNA
acggttgctagttcagcgaac

SEQ ID NO: 15713 - DNA, 21 bp, synthetic construct
  misc_feature 1..21: note = Synthetic construct
  source 1..21: mol_type = other DNA
acggttgctcgttcagcgaac

SEQ ID NO: 15714 - DNA, 21 bp, synthetic construct
  misc_feature 1..21: note = Synthetic construct
  source 1..21: mol_type = other DNA
acggttgctggttcagcgaac

SEQ ID NO: 15715 - DNA, 21 bp, synthetic construct
  misc_feature 1..21: note = Synthetic construct
  source 1..21: mol_type = other DNA
acggttgcttattcagcgaac

SEQ ID NO: 15716 - DNA, 21 bp, synthetic construct
  misc_feature 1..21: note = Synthetic construct
  source 1..21: mol_type = other DNA
acggttgcttcttcagcgaac

SEQ ID NO: 15717 - DNA, 21 bp, synthetic construct
  misc_feature 1..21: note = Synthetic construct
  source 1..21: mol_type = other DNA
acggttgctttttcagcgaac

SEQ ID NO: 15718 - DNA, 21 bp, synthetic construct
  misc_feature 1..21: note = Synthetic construct
  source 1..21: mol_type = other DNA
acggttgcttgatcagcgaac

SEQ ID NO: 15719 - DNA, 21 bp, synthetic construct
  misc_feature 1..21: note = Synthetic construct
  source 1..21: mol_type = other DNA
acggttgcttgctcagcgaac

SEQ ID NO: 15720 - DNA, 21 bp, synthetic construct
  misc_feature 1..21: note = Synthetic construct
  source 1..21: mol_type = other DNA
acggttgcttggtcagcgaac

SEQ ID NO: 15721 - DNA, 21 bp, synthetic construct
  misc_feature 1..21: note = Synthetic construct
  source 1..21: mol_type = other DNA
acggttgcttgtacagcgaac

SEQ ID NO: 15722 - DNA, 21 bp, synthetic construct
  misc_feature 1..21: note = Synthetic construct
  source 1..21: mol_type = other DNA
acggttgcttgtccagcgaac

SEQ ID NO: 15723 - DNA, 21 bp, synthetic construct
  misc_feature 1..21: note = Synthetic construct
  source 1..21: mol_type = other DNA
acggttgcttgtgcagcgaac

SEQ ID NO: 15724 - DNA, 21 bp, synthetic construct
  misc_feature 1..21: note = Synthetic construct
  source 1..21: mol_type = other DNA
acggttgcttgttaagcgaac

SEQ ID NO: 15725 - DNA, 21 bp, synthetic construct
  misc_feature 1..21: note = Synthetic construct
  source 1..21: mol_type = other DNA
acggttgcttgttgagcgaac

SEQ ID NO: 15726 - DNA, 21 bp, synthetic construct
  misc_feature 1..21: note = Synthetic construct
  source 1..21: mol_type = other DNA
acggttgcttgtttagcgaac

SEQ ID NO: 15727 - DNA, 21 bp, synthetic construct
  misc_feature 1..21: note = Synthetic construct
  source 1..21: mol_type = other DNA
acggttgcttgttccgcgaac

SEQ ID NO: 15728 - DNA, 21 bp, synthetic construct
  misc_feature 1..21: note = Synthetic construct
  source 1..21: mol_type = other DNA
acggttgcttgttcggcgaac

SEQ ID NO: 15729 - DNA, 21 bp, synthetic construct
  misc_feature 1..21: note = Synthetic construct
  source 1..21: mol_type = other DNA
acggttgcttgttctgcgaac

SEQ ID NO: 15730 - DNA, 21 bp, synthetic construct
  misc_feature 1..21: note = Synthetic construct
  source 1..21: mol_type = other DNA
acggttgcttgttcaacgaac

SEQ ID NO: 15731 - DNA, 21 bp, synthetic construct
  misc_feature 1..21: note = Synthetic construct
  source 1..21: mol_type = other DNA
acggttgcttgttcaccgaac

SEQ ID NO: 15732 - DNA, 21 bp, synthetic construct
  misc_feature 1..21: note = Synthetic construct
  source 1..21: mol_type = other DNA
acggttgcttgttcatcgaac

SEQ ID NO: 15733 - DNA, 21 bp, synthetic construct
  misc_feature 1..21: note = Synthetic construct
  source 1..21: mol_type = other DNA
acggttgcttgttcagagaac

SEQ ID NO: 15734 - DNA, 21 bp, synthetic construct
  misc_feature 1..21: note = Synthetic construct
  source 1..21: mol_type = other DNA
acggttgcttgttcagggaac

SEQ ID NO: 15735 - DNA, 21 bp, synthetic construct
  misc_feature 1..21: note = Synthetic construct
  source 1..21: mol_type = other DNA
acggttgcttgttcagtgaac

SEQ ID NO: 15736 - DNA, 21 bp, synthetic construct
  misc_feature 1..21: note = Synthetic construct
  source 1..21: mol_type = other DNA
acggttgcttgttcagcaaac

SEQ ID NO: 15737 - DNA, 21 bp, synthetic construct
  misc_feature 1..21: note = Synthetic construct
  source 1..21: mol_type = other DNA
acggttgcttgttcagccaac

SEQ ID NO: 15738 - DNA, 21 bp, synthetic construct
  misc_feature 1..21: note = Synthetic construct
  source 1..21: mol_type = other DNA
acggttgcttgttcagctaac

SEQ ID NO: 15739 - DNA, 21 bp, synthetic construct
  misc_feature 1..21: note = Synthetic construct
  source 1..21: mol_type = other DNA
acggttgcttgttcagcgcac

SEQ ID NO: 15740 - DNA, 21 bp, synthetic construct
  misc_feature 1..21: note = Synthetic construct
  source 1..21: mol_type = other DNA
acggttgcttgttcagcggac

SEQ ID NO: 15741 - DNA, 21 bp, synthetic construct
  misc_feature 1..21: note = Synthetic construct
  source 1..21: mol_type = other DNA
acggttgcttgttcagcgtac

SEQ ID NO: 15742 - DNA, 21 bp, synthetic construct
  misc_feature 1..21: note = Synthetic construct
  source 1..21: mol_type = other DNA
acggttgcttgttcagcgacc

SEQ ID NO: 15743 - DNA, 21 bp, synthetic construct
  misc_feature 1..21: note = Synthetic construct
  source 1..21: mol_type = other DNA
acggttgcttgttcagcgagc

SEQ ID NO: 15744 - DNA, 21 bp, synthetic construct
  misc_feature 1..21: note = Synthetic construct
  source 1..21: mol_type = other DNA
acggttgcttgttcagcgatc

SEQ ID NO: 15745 - DNA, 21 bp, synthetic construct
  misc_feature 1..21: note = Synthetic construct
  source 1..21: mol_type = other DNA
acggttgcttgttcagcgaaa

SEQ ID NO: 15746 - DNA, 21 bp, synthetic construct
  misc_feature 1..21: note = Synthetic construct
  source 1..21: mol_type = other DNA
acggttgcttgttcagcgaag

SEQ ID NO: 15747 - DNA, 21 bp, synthetic construct
  misc_feature 1..21: note = Synthetic construct
  source 1..21: mol_type = other DNA
acggttgcttgttcagcgaat

SEQ ID NO: 15748 - DNA, 20 bp, synthetic construct
  misc_feature 1..20: note = Synthetic construct
  source 1..20: mol_type = other DNA
actgccggccacgtgttttg

SEQ ID NO: 15749 - DNA, 20 bp, synthetic construct
  misc_feature 1..20: note = Synthetic construct
  source 1..20: mol_type = other DNA
gctgccggccacgtgttttg

SEQ ID NO: 15750 - DNA, 20 bp, synthetic construct
  misc_feature 1..20: note = Synthetic construct
  source 1..20: mol_type = other DNA
tctgccggccacgtgttttg

SEQ ID NO: 15751 - DNA, 20 bp, synthetic construct
  misc_feature 1..20: note = Synthetic construct
  source 1..20: mol_type = other DNA
catgccggccacgtgttttg

SEQ ID NO: 15752 - DNA, 20 bp, synthetic construct
  misc_feature 1..20: note = Synthetic construct
  source 1..20: mol_type = other DNA
cgtgccggccacgtgttttg

SEQ ID NO: 15753 - DNA, 20 bp, synthetic construct
  misc_feature 1..20: note = Synthetic construct
  source 1..20: mol_type = other DNA
cttgccggccacgtgttttg

SEQ ID NO: 15754 - DNA, 20 bp, synthetic construct
  misc_feature 1..20: note = Synthetic construct
  source 1..20: mol_type = other DNA
ccagccggccacgtgttttg

SEQ ID NO: 15755 - DNA, 20 bp, synthetic construct
  misc_feature 1..20: note = Synthetic construct
  source 1..20: mol_type = other DNA
cccgccggccacgtgttttg

SEQ ID NO: 15756 - DNA, 20 bp, synthetic construct
  misc_feature 1..20: note = Synthetic construct
  source 1..20: mol_type = other DNA
ccggccggccacgtgttttg

SEQ ID NO: 15757 - DNA, 20 bp, synthetic construct
  misc_feature 1..20: note = Synthetic construct
  source 1..20: mol_type = other DNA
cctaccggccacgtgttttg

SEQ ID NO: 15758 - DNA, 20 bp, synthetic construct
  misc_feature 1..20: note = Synthetic construct
  source 1..20: mol_type = other DNA
cctcccggccacgtgttttg

SEQ ID NO: 15759 - DNA, 20 bp, synthetic construct
  misc_feature 1..20: note = Synthetic construct
  source 1..20: mol_type = other DNA
ccttccggccacgtgttttg

SEQ ID NO: 15760 - DNA, 20 bp, synthetic construct
  misc_feature 1..20: note = Synthetic construct
  source 1..20: mol_type = other DNA
cctgacggccacgtgttttg

SEQ ID NO: 15761 - DNA, 20 bp, synthetic construct
  misc_feature 1..20: note = Synthetic construct
  source 1..20: mol_type = other DNA
cctggcggccacgtgttttg

SEQ ID NO: 15762 - DNA, 20 bp, synthetic construct
  misc_feature 1..20: note = Synthetic construct
  source 1..20: mol_type = other DNA
cctgtcggccacgtgttttg

SEQ ID NO: 15763 - DNA, 20 bp, synthetic construct
  misc_feature 1..20: note = Synthetic construct
  source 1..20: mol_type = other DNA
cctgcaggccacgtgttttg

SEQ ID NO: 15764 - DNA, 20 bp, synthetic construct
  misc_feature 1..20: note = Synthetic construct
  source 1..20: mol_type = other DNA
cctgcgggccacgtgttttg

SEQ ID NO: 15765 - DNA, 20 bp, synthetic construct
  misc_feature 1..20: note = Synthetic construct
  source 1..20: mol_type = other DNA
cctgctggccacgtgttttg

SEQ ID NO: 15766 - DNA, 20 bp, synthetic construct
  misc_feature 1..20: note = Synthetic construct
  source 1..20: mol_type = other DNA
cctgccagccacgtgttttg

SEQ ID NO: 15767 - DNA, 20 bp, synthetic construct
  misc_feature 1..20: note = Synthetic construct
  source 1..20: mol_type = other DNA
cctgcccgccacgtgttttg

SEQ ID NO: 15768 - DNA, 20 bp, synthetic construct
  misc_feature 1..20: note = Synthetic construct
  source 1..20: mol_type = other DNA
cctgcctgccacgtgttttg

SEQ ID NO: 15769 - DNA, 20 bp, synthetic construct
  misc_feature 1..20: note = Synthetic construct
  source 1..20: mol_type = other DNA
cctgccgaccacgtgttttg

SEQ ID NO: 15770 - DNA, 20 bp, synthetic construct
  misc_feature 1..20: note = Synthetic construct
  source 1..20: mol_type = other DNA
cctgccgcccacgtgttttg

SEQ ID NO: 15771 - DNA, 20 bp, synthetic construct
  misc_feature 1..20: note = Synthetic construct
  source 1..20: mol_type = other DNA
cctgccgtccacgtgttttg

SEQ ID NO: 15772 - DNA, 20 bp, synthetic construct
  misc_feature 1..20: note = Synthetic construct
  source 1..20: mol_type = other DNA
cctgccggacacgtgttttg

SEQ ID NO: 15773 - DNA, 20 bp, synthetic construct
  misc_feature 1..20: note = Synthetic construct
  source 1..20: mol_type = other DNA
cctgccgggcacgtgttttg

SEQ ID NO: 15774 - DNA, 20 bp, synthetic construct
  misc_feature 1..20: note = Synthetic construct
  source 1..20: mol_type = other DNA
cctgccggtcacgtgttttg

SEQ ID NO: 15775 - DNA, 20 bp, synthetic construct
  misc_feature 1..20: note = Synthetic construct
  source 1..20: mol_type = other DNA
cctgccggcaacgtgttttg

SEQ ID NO: 15776 - DNA, 20 bp, synthetic construct
  misc_feature 1..20: note = Synthetic construct
  source 1..20: mol_type = other DNA
cctgccggcgacgtgttttg

SEQ ID NO: 15777 - DNA, 20 bp, synthetic construct
  misc_feature 1..20: note = Synthetic construct
  source 1..20: mol_type = other DNA
cctgccggctacgtgttttg

SEQ ID NO: 15778 - DNA, 20 bp, synthetic construct
  misc_feature 1..20: note = Synthetic construct
  source 1..20: mol_type = other DNA
cctgccggccccgtgttttg

SEQ ID NO: 15779 - DNA, 20 bp, synthetic construct
  misc_feature 1..20: note = Synthetic construct
  source 1..20: mol_type = other DNA
cctgccggccgcgtgttttg

SEQ ID NO: 15780 - DNA, 20 bp, synthetic construct
  misc_feature 1..20: note = Synthetic construct
  source 1..20: mol_type = other DNA
cctgccggcctcgtgttttg

SEQ ID NO: 15781 - DNA, 20 bp, synthetic construct
  misc_feature 1..20: note = Synthetic construct
  source 1..20: mol_type = other DNA
cctgccggccaagtgttttg

SEQ ID NO: 15782 - DNA, 20 bp, synthetic construct
  misc_feature 1..20: note = Synthetic construct
  source 1..20: mol_type = other DNA
cctgccggccaggtgttttg

SEQ ID NO: 15783 - DNA, 20 bp, synthetic construct
  misc_feature 1..20: note = Synthetic construct
  source 1..20: mol_type = other DNA
cctgccggccatgtgttttg

SEQ ID NO: 15784 - DNA, 20 bp, synthetic construct
  misc_feature 1..20: note = Synthetic construct
  source 1..20: mol_type = other DNA
cctgccggccacatgttttg

SEQ ID NO: 15785 - DNA, 20 bp, synthetic construct
  misc_feature 1..20: note = Synthetic construct
  source 1..20: mol_type = other DNA
cctgccggccacctgttttg

SEQ ID NO: 15786 - DNA, 20 bp, synthetic construct
  misc_feature 1..20: note = Synthetic construct
  source 1..20: mol_type = other DNA
cctgccggccacttgttttg

SEQ ID NO: 15787 - DNA, 20 bp, synthetic construct
  misc_feature 1..20: note = Synthetic construct
  source 1..20: mol_type = other DNA
cctgccggccacgagttttg

SEQ ID NO: 15788 - DNA, 20 bp, synthetic construct
  misc_feature 1..20: note = Synthetic construct
  source 1..20: mol_type = other DNA
cctgccggccacgcgttttg

SEQ ID NO: 15789 - DNA, 20 bp, synthetic construct
  misc_feature 1..20: note = Synthetic construct
  source 1..20: mol_type = other DNA
cctgccggccacgggttttg

SEQ ID NO: 15790 - DNA, 20 bp, synthetic construct
  misc_feature 1..20: note = Synthetic construct
  source 1..20: mol_type = other DNA
cctgccggccacgtattttg

SEQ ID NO: 15791 - DNA, 20 bp, synthetic construct
  misc_feature 1..20: note = Synthetic construct
  source 1..20: mol_type = other DNA
cctgccggccacgtcttttg

SEQ ID NO: 15792 - DNA, 20 bp, synthetic construct
  misc_feature 1..20: note = Synthetic construct
  source 1..20: mol_type = other DNA
cctgccggccacgttttttg

SEQ ID NO: 15793 - DNA, 20 bp, synthetic construct
  misc_feature 1..20: note = Synthetic construct
  source 1..20: mol_type = other DNA
cctgccggccacgtgatttg

SEQ ID NO: 15794 - DNA, 20 bp, synthetic construct
  misc_feature 1..20: note = Synthetic construct
  source 1..20: mol_type = other DNA
cctgccggccacgtgctttg

SEQ ID NO: 15795 - DNA, 20 bp, synthetic construct
  misc_feature 1..20: note = Synthetic construct
  source 1..20: mol_type = other DNA
cctgccggccacgtggtttg

SEQ ID NO: 15796 - DNA, 20 bp, synthetic construct
  misc_feature 1..20: note = Synthetic construct
  source 1..20: mol_type = other DNA
cctgccggccacgtgtattg

SEQ ID NO: 15797 - DNA, 20 bp, synthetic construct
  misc_feature 1..20: note = Synthetic construct
  source 1..20: mol_type = other DNA
cctgccggccacgtgtcttg

SEQ ID NO: 15798 - DNA, 20 bp, synthetic construct
  misc_feature 1..20: note = Synthetic construct
  source 1..20: mol_type = other DNA
cctgccggccacgtgtgttg

SEQ ID NO: 15799 - DNA, 20 bp, synthetic construct
  misc_feature 1..20: note = Synthetic construct
  source 1..20: mol_type = other DNA
cctgccggccacgtgttatg

SEQ ID NO: 15800 - DNA, 20 bp, synthetic construct
  misc_feature 1..20: note = Synthetic construct
  source 1..20: mol_type = other DNA
cctgccggccacgtgttctg

SEQ ID NO: 15801 - DNA, 20 bp, synthetic construct
  misc_feature 1..20: note = Synthetic construct
  source 1..20: mol_type = other DNA
cctgccggccacgtgttgtg

SEQ ID NO: 15802 - DNA, 20 bp, synthetic construct
  misc_feature 1..20: note = Synthetic construct
  source 1..20: mol_type = other DNA
cctgccggccacgtgtttag

SEQ ID NO: 15803 - DNA, 20 bp, synthetic construct
  misc_feature 1..20: note = Synthetic construct
  source 1..20: mol_type = other DNA
cctgccggccacgtgtttcg

SEQ ID NO: 15804 - DNA, 20 bp, synthetic construct
  misc_feature 1..20: note = Synthetic construct
  source 1..20: mol_type = other DNA
cctgccggccacgtgtttgg

SEQ ID NO: 15805 - DNA, 20 bp, synthetic construct
  misc_feature 1..20: note = Synthetic construct
  source 1..20: mol_type = other DNA
cctgccggccacgtgtttta

SEQ ID NO: 15806 - DNA, 20 bp, synthetic construct
  misc_feature 1..20: note = Synthetic construct
  source 1..20: mol_type = other DNA
cctgccggccacgtgttttc

SEQ ID NO: 15807 - DNA, 20 bp, synthetic construct
  misc_feature 1..20: note = Synthetic construct
  source 1..20: mol_type = other DNA
cctgccggccacgtgttttt

SEQ ID NO: 15808 - DNA, 21 bp, synthetic construct
  misc_feature 1..21: note = Synthetic construct
  source 1..21: mol_type = other DNA
agtcgcgagttgtgaggctgt

SEQ ID NO: 15809 - DNA, 21 bp, synthetic construct
  misc_feature 1..21: note = Synthetic construct
  source 1..21: mol_type = other DNA
ggtcgcgagttgtgaggctgt

SEQ ID NO: 15810 - DNA, 21 bp, synthetic construct
  misc_feature 1..21: note = Synthetic construct
  source 1..21: mol_type = other DNA
tgtcgcgagttgtgaggctgt

SEQ ID NO: 15811 - DNA, 21 bp, synthetic construct
  misc_feature 1..21: note = Synthetic construct
  source 1..21: mol_type = other DNA
catcgcgagttgtgaggctgt

SEQ ID NO: 15812 - DNA, 21 bp, synthetic construct
  misc_feature 1..21: note = Synthetic construct
  source 1..21: mol_type = other DNA
cctcgcgagttgtgaggctgt

SEQ ID NO: 15813 - DNA, 21 bp, synthetic construct
  misc_feature 1..21: note = Synthetic construct
  source 1..21: mol_type = other DNA
cttcgcgagttgtgaggctgt

SEQ ID NO: 15814 - DNA, 21 bp, synthetic construct
  misc_feature 1..21: note = Synthetic construct
  source 1..21: mol_type = other DNA
cgacgcgagttgtgaggctgt

SEQ ID NO: 15815 - DNA, 21 bp, synthetic construct
  misc_feature 1..21: note = Synthetic construct
  source 1..21: mol_type = other DNA
cgccgcgagttgtgaggctgt

SEQ ID NO: 15816 - DNA, 21 bp, synthetic construct
  misc_feature 1..21: note = Synthetic construct
  source 1..21: mol_type = other DNA
cggcgcgagttgtgaggctgt

SEQ ID NO: 15817 - DNA, 21 bp, synthetic construct
  misc_feature 1..21: note = Synthetic construct
  source 1..21: mol_type = other DNA
cgtagcgagttgtgaggctgt

SEQ ID NO: 15818 - DNA, 21 bp, synthetic construct
  misc_feature 1..21: note = Synthetic construct
  source 1..21: mol_type = other DNA
cgtggcgagttgtgaggctgt

SEQ ID NO: 15819 - DNA, 21 bp, synthetic construct
  misc_feature 1..21: note = Synthetic construct
  source 1..21: mol_type = other DNA
cgttgcgagttgtgaggctgt

SEQ ID NO: 15820 - DNA, 21 bp, synthetic construct
  misc_feature 1..21: note = Synthetic construct
  source 1..21: mol_type = other DNA
cgtcacgagttgtgaggctgt

SEQ ID NO: 15821 - DNA, 21 bp, synthetic construct
  misc_feature 1..21: note = Synthetic construct
  source 1..21: mol_type = other DNA
cgtcccgagttgtgaggctgt

SEQ ID NO: 15822 - DNA, 21 bp, synthetic construct
  misc_feature 1..21: note = Synthetic construct
  source 1..21: mol_type = other DNA
cgtctcgagttgtgaggctgt

SEQ ID NO: 15823 - DNA, 21 bp, synthetic construct
  misc_feature 1..21: note = Synthetic construct
  source 1..21: mol_type = other DNA
cgtcgagagttgtgaggctgt

SEQ ID NO: 15824 - DNA, 21 bp, synthetic construct
  misc_feature 1..21: note = Synthetic construct
  source 1..21: mol_type = other DNA
cgtcgggagttgtgaggctgt

SEQ ID NO: 15825 - DNA, 21 bp, synthetic construct
  misc_feature 1..21: note = Synthetic construct
  source 1..21: mol_type = other DNA
cgtcgtgagttgtgaggctgt

SEQ ID NO: 15826 - DNA, 21 bp, synthetic construct
  misc_feature 1..21: note = Synthetic construct
  source 1..21: mol_type = other DNA
cgtcgcaagttgtgaggctgt

SEQ ID NO: 15827 - DNA, 21 bp, synthetic construct
  misc_feature 1..21: note = Synthetic construct
  source 1..21: mol_type = other DNA
cgtcgccagttgtgaggctgt

SEQ ID NO: 15828 - DNA, 21 bp, synthetic construct
  misc_feature 1..21: note = Synthetic construct
  source 1..21: mol_type = other DNA
cgtcgctagttgtgaggctgt

SEQ ID NO: 15829 - DNA, 21 bp, synthetic construct
  misc_feature 1..21: note = Synthetic construct
  source 1..21: mol_type = other DNA
cgtcgcgcgttgtgaggctgt

SEQ ID NO: 15830 - DNA, 21 bp, synthetic construct
  misc_feature 1..21: note = Synthetic construct
  source 1..21: mol_type = other DNA
cgtcgcgggttgtgaggctgt

SEQ ID NO: 15831 - DNA, 21 bp, synthetic construct
  misc_feature 1..21: note = Synthetic construct
  source 1..21: mol_type = other DNA
cgtcgcgtgttgtgaggctgt

SEQ ID NO: 15832 - DNA, 21 bp, synthetic construct
  misc_feature 1..21: note = Synthetic construct
  source 1..21: mol_type = other DNA
cgtcgcgaattgtgaggctgt

SEQ ID NO: 15833 - DNA, 21 bp, synthetic construct
  misc_feature 1..21: note = Synthetic construct
  source 1..21: mol_type = other DNA
cgtcgcgacttgtgaggctgt

SEQ ID NO: 15834 - DNA, 21 bp, synthetic construct
  misc_feature 1..21: note = Synthetic construct
  source 1..21: mol_type = other DNA
cgtcgcgatttgtgaggctgt

SEQ ID NO: 15835 - DNA, 21 bp, synthetic construct
  misc_feature 1..21: note = Synthetic construct
  source 1..21: mol_type = other DNA
cgtcgcgagatgtgaggctgt

SEQ ID NO: 15836 - DNA, 21 bp, synthetic construct
  misc_feature 1..21: note = Synthetic construct
  source 1..21: mol_type = other DNA
cgtcgcgagctgtgaggctgt

SEQ ID NO: 15837 - DNA, 21 bp, synthetic construct
  misc_feature 1..21: note = Synthetic construct
  source 1..21: mol_type = other DNA
cgtcgcgaggtgtgaggctgt

SEQ ID NO: 15838 - DNA, 21 bp, synthetic construct
  misc_feature 1..21: note = Synthetic construct
  source 1..21: mol_type = other DNA
cgtcgcgagtagtgaggctgt

SEQ ID NO: 15839 - DNA, 21 bp, synthetic construct
  misc_feature 1..21: note = Synthetic construct
  source 1..21: mol_type = other DNA
cgtcgcgagtcgtgaggctgt

SEQ ID NO: 15840 - DNA, 21 bp, synthetic construct
  misc_feature 1..21: note = Synthetic construct
  source 1..21: mol_type = other DNA
cgtcgcgagtggtgaggctgt

SEQ ID NO: 15841 - DNA, 21 bp, synthetic construct
  misc_feature 1..21: note = Synthetic construct
  source 1..21: mol_type = other DNA
cgtcgcgagttatgaggctgt

SEQ ID NO: 15842 - DNA, 21 bp, synthetic construct
  misc_feature 1..21: note = Synthetic construct
  source 1..21: mol_type = other DNA
cgtcgcgagttctgaggctgt

SEQ ID NO: 15843 - DNA, 21 bp, synthetic construct
  misc_feature 1..21: note = Synthetic construct
  source 1..21: mol_type = other DNA
cgtcgcgagttttgaggctgt

SEQ ID NO: 15844 - DNA, 21 bp, synthetic construct
  misc_feature 1..21: note = Synthetic construct
  source 1..21: mol_type = other DNA
cgtcgcgagttgagaggctgt

SEQ ID NO: 15845 - DNA, 21 bp, synthetic construct
  misc_feature 1..21: note = Synthetic construct
  source 1..21: mol_type = other DNA
cgtcgcgagttgcgaggctgt

SEQ ID NO: 15846 - DNA, 21 bp, synthetic construct
  misc_feature 1..21: note = Synthetic construct
  source 1..21: mol_type = other DNA
cgtcgcgagttgggaggctgt

SEQ ID NO: 15847 - DNA, 21 bp, synthetic construct
  misc_feature 1..21: note = Synthetic construct
  source 1..21: mol_type = other DNA
cgtcgcgagttgtaaggctgt

SEQ ID NO: 15848 - DNA, 21 bp, synthetic construct
  misc_feature 1..21: note = Synthetic construct
  source 1..21: mol_type = other DNA
cgtcgcgagttgtcaggctgt

SEQ ID NO: 15849 - DNA, 21 bp, synthetic construct
  misc_feature 1..21: note = Synthetic construct
  source 1..21: mol_type = other DNA
cgtcgcgagttgttaggctgt

SEQ ID NO: 15850 - DNA, 21 bp, synthetic construct
  misc_feature 1..21: note = Synthetic construct
  source 1..21: mol_type = other DNA
cgtcgcgagttgtgcggctgt

SEQ ID NO: 15851 - DNA, 21 bp, synthetic construct
  misc_feature 1..21: note = Synthetic construct
  source 1..21: mol_type = other DNA
cgtcgcgagttgtggggctgt

SEQ ID NO: 15852 - DNA, 21 bp, synthetic construct
  misc_feature 1..21: note = Synthetic construct
  source 1..21: mol_type = other DNA
cgtcgcgagttgtgtggctgt

SEQ ID NO: 15853 - DNA, 21 bp, synthetic construct
  misc_feature 1..21: note = Synthetic construct
  source 1..21: mol_type = other DNA
cgtcgcgagttgtgaagctgt

SEQ ID NO: 15854 - DNA, 21 bp, synthetic construct
  misc_feature 1..21: note = Synthetic construct
  source 1..21: mol_type = other DNA
cgtcgcgagttgtgacgctgt

SEQ ID NO: 15855 - DNA, 21 bp, synthetic construct
  misc_feature 1..21: note = Synthetic construct
  source 1..21: mol_type = other DNA
cgtcgcgagttgtgatgctgt

SEQ ID NO: 15856 - DNA, 21 bp, synthetic construct
  misc_feature 1..21: note = Synthetic construct
  source 1..21: mol_type = other DNA
cgtcgcgagttgtgagactgt

SEQ ID NO: 15857 - DNA, 21 bp, synthetic construct
  misc_feature 1..21: note = Synthetic construct
  source 1..21: mol_type = other DNA
cgtcgcgagttgtgagcctgt

SEQ ID NO: 15858 - DNA, 21 bp, synthetic construct
  misc_feature 1..21: note = Synthetic construct
  source 1..21: mol_type = other DNA
cgtcgcgagttgtgagtctgt

SEQ ID NO: 15859 - DNA, 21 bp, synthetic construct
  misc_feature 1..21: note = Synthetic construct
  source 1..21: mol_type = other DNA
cgtcgcgagttgtgaggatgt

SEQ ID NO: 15860 - DNA, 21 bp, synthetic construct
  misc_feature 1..21: note = Synthetic construct
  source 1..21: mol_type = other DNA
cgtcgcgagttgtgagggtgt

SEQ ID NO: 15861 - DNA, 21 bp, synthetic construct
  misc_feature 1..21: note = Synthetic construct
  source 1..21: mol_type = other DNA
cgtcgcgagttgtgaggttgt

SEQ ID NO: 15862 - DNA, 21 bp, synthetic construct
  misc_feature 1..21: note = Synthetic construct
  source 1..21: mol_type = other DNA
cgtcgcgagttgtgaggcagt

SEQ ID NO: 15863 - DNA, 21 bp, synthetic construct
  misc_feature 1..21: note = Synthetic construct
  source 1..21: mol_type = other DNA
cgtcgcgagttgtgaggccgt

SEQ ID NO: 15864 - DNA, 21 bp, synthetic construct
  misc_feature 1..21: note = Synthetic construct
  source 1..21: mol_type = other DNA
cgtcgcgagttgtgaggcggt

SEQ ID NO: 15865 - DNA, 21 bp, synthetic construct
  misc_feature 1..21: note = Synthetic construct
  source 1..21: mol_type = other DNA
cgtcgcgagttgtgaggctat

SEQ ID NO: 15866 - DNA, 21 bp, synthetic construct
  misc_feature 1..21: note = Synthetic construct
  source 1..21: mol_type = other DNA
cgtcgcgagttgtgaggctct

SEQ ID NO: 15867 - DNA, 21 bp, synthetic construct
  misc_feature 1..21: note = Synthetic construct
  source 1..21: mol_type = other DNA
cgtcgcgagttgtgaggcttt

SEQ ID NO: 15868 - DNA, 21 bp, synthetic construct
  misc_feature 1..21: note = Synthetic construct
  source 1..21: mol_type = other DNA
cgtcgcgagttgtgaggctga

SEQ ID NO: 15869 - DNA, 21 bp, synthetic construct
  misc_feature 1..21: note = Synthetic construct
  source 1..21: mol_type = other DNA
cgtcgcgagttgtgaggctgc

SEQ ID NO: 15870 - DNA, 21 bp, synthetic construct
  misc_feature 1..21: note = Synthetic construct
  source 1..21: mol_type = other DNA
cgtcgcgagttgtgaggctgg

SEQ ID NO: 15871 - DNA, 22 bp, synthetic construct
  misc_feature 1..22: note = Synthetic construct
  source 1..22: mol_type = other DNA
ctctaacttgatgttagtaccg

SEQ ID NO: 15872 - DNA, 22 bp, synthetic construct
  misc_feature 1..22: note = Synthetic construct
  source 1..22: mol_type = other DNA
gtctaacttgatgttagtaccg

SEQ ID NO: 15873 - DNA, 22 bp, synthetic construct
  misc_feature 1..22: note = Synthetic construct
  source 1..22: mol_type = other DNA
ttctaacttgatgttagtaccg

SEQ ID NO: 15874 - DNA, 22 bp, synthetic construct
  misc_feature 1..22: note = Synthetic construct
  source 1..22: mol_type = other DNA
aactaacttgatgttagtaccg

SEQ ID NO: 15875 - DNA, 22 bp, synthetic construct
  misc_feature 1..22: note = Synthetic construct
  source 1..22: mol_type = other DNA
acctaacttgatgttagtaccg

SEQ ID NO: 15876 - DNA, 22 bp, synthetic construct
  misc_feature 1..22: note = Synthetic construct
  source 1..22: mol_type = other DNA
agctaacttgatgttagtaccg

SEQ ID NO: 15877 - DNA, 22 bp, synthetic construct
  misc_feature 1..22: note = Synthetic construct
  source 1..22: mol_type = other DNA
atataacttgatgttagtaccg

SEQ ID NO: 15878 - DNA, 22 bp, synthetic construct
  misc_feature 1..22: note = Synthetic construct
  source 1..22: mol_type = other DNA
atgtaacttgatgttagtaccg

SEQ ID NO: 15879 - DNA, 22 bp, synthetic construct
  misc_feature 1..22: note = Synthetic construct
  source 1..22: mol_type = other DNA
atttaacttgatgttagtaccg

SEQ ID NO: 15880 - DNA, 22 bp, synthetic construct
  misc_feature 1..22: note = Synthetic construct
  source 1..22: mol_type = other DNA
atcaaacttgatgttagtaccg

SEQ ID NO: 15881 - DNA, 22 bp, synthetic construct
  misc_feature 1..22: note = Synthetic construct
  source 1..22: mol_type = other DNA
atccaacttgatgttagtaccg

SEQ ID NO: 15882 - DNA, 22 bp, synthetic construct
  misc_feature 1..22: note = Synthetic construct
  source 1..22: mol_type = other DNA
atcgaacttgatgttagtaccg

SEQ ID NO: 15883 - DNA, 22 bp, synthetic construct
  misc_feature 1..22: note = Synthetic construct
  source 1..22: mol_type = other DNA
atctcacttgatgttagtaccg

SEQ ID NO: 15884 - DNA, 22 bp, synthetic construct
  misc_feature 1..22: note = Synthetic construct
  source 1..22: mol_type = other DNA
atctgacttgatgttagtaccg

SEQ ID NO: 15885 - DNA, 22 bp, synthetic construct
  misc_feature 1..22: note = Synthetic construct
  source 1..22: mol_type = other DNA
atcttacttgatgttagtaccg

SEQ ID NO: 15886 - DNA, 22 bp, synthetic construct
  misc_feature 1..22: note = Synthetic construct
  source 1..22: mol_type = other DNA
atctaccttgatgttagtaccg

SEQ ID NO: 15887 - DNA, 22 bp, synthetic construct
  misc_feature 1..22: note = Synthetic construct
  source 1..22: mol_type = other DNA
atctagcttgatgttagtaccg

SEQ ID NO: 15888 - DNA, 22 bp, synthetic construct
  misc_feature 1..22: note = Synthetic construct
  source 1..22: mol_type = other DNA
atctatcttgatgttagtaccg

SEQ ID NO: 15889 - DNA, 22 bp, synthetic construct
  misc_feature 1..22: note = Synthetic construct
  source 1..22: mol_type = other DNA
atctaaattgatgttagtaccg

SEQ ID NO: 15890 - DNA, 22 bp, synthetic construct
  misc_feature 1..22: note = Synthetic construct
  source 1..22: mol_type = other DNA
atctaagttgatgttagtaccg

SEQ ID NO: 15891 - DNA, 22 bp, synthetic construct
  misc_feature 1..22: note = Synthetic construct
  source 1..22: mol_type = other DNA
atctaatttgatgttagtaccg

SEQ ID NO: 15892 - DNA, 22 bp, synthetic construct
  misc_feature 1..22: note = Synthetic construct
  source 1..22: mol_type = other DNA
atctaacatgatgttagtaccg

SEQ ID NO: 15893 - DNA, 22 bp, synthetic construct
  misc_feature 1..22: note = Synthetic construct
  source 1..22: mol_type = other DNA
atctaacctgatgttagtaccg

SEQ ID NO: 15894 - DNA, 22 bp, synthetic construct
  misc_feature 1..22: note = Synthetic construct
  source 1..22: mol_type = other DNA
atctaacgtgatgttagtaccg

SEQ ID NO: 15895 - DNA, 22 bp, synthetic construct
  misc_feature 1..22: note = Synthetic construct
  source 1..22: mol_type = other DNA
atctaactagatgttagtaccg

SEQ ID NO: 15896 - DNA, 22 bp, synthetic construct
  misc_feature 1..22: note = Synthetic construct
  source 1..22: mol_type = other DNA
atctaactcgatgttagtaccg

SEQ ID NO: 15897 - DNA, 22 bp, synthetic construct
  misc_feature 1..22: note = Synthetic construct
  source 1..22: mol_type = other DNA
atctaactggatgttagtaccg

SEQ ID NO: 15898 - DNA, 22 bp, synthetic construct
  misc_feature 1..22: note = Synthetic construct
  source 1..22: mol_type = other DNA
atctaacttaatgttagtaccg

SEQ ID NO: 15899 - DNA, 22 bp, synthetic construct
  misc_feature 1..22: note = Synthetic construct
  source 1..22: mol_type = other DNA
atctaacttcatgttagtaccg

SEQ ID NO: 15900 - DNA, 22 bp, synthetic construct
  misc_feature 1..22: note = Synthetic construct
  source 1..22: mol_type = other DNA
atctaactttatgttagtaccg

SEQ ID NO: 15901 - DNA, 22 bp, synthetic construct
  misc_feature 1..22: note = Synthetic construct
  source 1..22: mol_type = other DNA
atctaacttgctgttagtaccg

SEQ ID NO: 15902 - DNA, 22 bp, synthetic construct
  misc_feature 1..22: note = Synthetic construct
  source 1..22: mol_type = other DNA
atctaacttggtgttagtaccg

SEQ ID NO: 15903 - DNA, 22 bp, synthetic construct
  misc_feature 1..22: note = Synthetic construct
  source 1..22: mol_type = other DNA
atctaacttgttgttagtaccg

SEQ ID NO: 15904 - DNA, 22 bp, synthetic construct
  misc_feature 1..22: note = Synthetic construct
  source 1..22: mol_type = other DNA
atctaacttgaagttagtaccg

SEQ ID NO: 15905 - DNA, 22 bp, synthetic construct
  misc_feature 1..22: note = Synthetic construct
  source 1..22: mol_type = other DNA
atctaacttgacgttagtaccg

SEQ ID NO: 15906 - DNA, 22 bp, synthetic construct
  misc_feature 1..22: note = Synthetic construct
  source 1..22: mol_type = other DNA
atctaacttgaggttagtaccg

SEQ ID NO: 15907 - DNA, 22 bp, synthetic construct
  misc_feature 1..22: note = Synthetic construct
  source 1..22: mol_type = other DNA
atctaacttgatattagtaccg

SEQ ID NO: 15908 - DNA, 22 bp, synthetic construct
  misc_feature 1..22: note = Synthetic construct
  source 1..22: mol_type = other DNA
atctaacttgatcttagtaccg

SEQ ID NO: 15909 - DNA, 22 bp, synthetic construct
  misc_feature 1..22: note = Synthetic construct
  source 1..22: mol_type = other DNA
atctaacttgattttagtaccg

SEQ ID NO: 15910 - DNA, 22 bp, synthetic construct
  misc_feature 1..22: note = Synthetic construct
  source 1..22: mol_type = other DNA
atctaacttgatgatagtaccg

SEQ ID NO: 15911 - DNA, 22 bp, synthetic construct
  misc_feature 1..22: note = Synthetic construct
  source 1..22: mol_type = other DNA
atctaacttgatgctagtaccg

SEQ ID NO: 15912 - DNA, 22 bp, synthetic construct
  misc_feature 1..22: note = Synthetic construct
  source 1..22: mol_type = other DNA
atctaacttgatggtagtaccg

SEQ ID NO: 15913 - DNA, 22 bp, synthetic construct
  misc_feature 1..22: note = Synthetic construct
  source 1..22: mol_type = other DNA
atctaacttgatgtaagtaccg

SEQ ID NO: 15914 - DNA, 22 bp, synthetic construct
  misc_feature 1..22: note = Synthetic construct
  source 1..22: mol_type = other DNA
atctaacttgatgtcagtaccg

SEQ ID NO: 15915 - DNA, 22 bp, synthetic construct
  misc_feature 1..22: note = Synthetic construct
  source 1..22: mol_type = other DNA
atctaacttgatgtgagtaccg

SEQ ID NO: 15916 - DNA, 22 bp, synthetic construct
  misc_feature 1..22: note = Synthetic construct
  source 1..22: mol_type = other DNA
atctaacttgatgttcgtaccg

SEQ ID NO: 15917 - DNA, 22 bp, synthetic construct
  misc_feature 1..22: note = Synthetic construct
  source 1..22: mol_type = other DNA
atctaacttgatgttggtaccg

SEQ ID NO: 15918 - DNA, 22 bp, synthetic construct
  misc_feature 1..22: note = Synthetic construct
  source 1..22: mol_type = other DNA
atctaacttgatgtttgtaccg

SEQ ID NO: 15919 - DNA, 22 bp, synthetic construct
  misc_feature 1..22: note = Synthetic construct
  source 1..22: mol_type = other DNA
atctaacttgatgttaataccg

SEQ ID NO: 15920 - DNA, 22 bp, synthetic construct
  misc_feature 1..22: note = Synthetic construct
  source 1..22: mol_type = other DNA
atctaacttgatgttactaccg

SEQ ID NO: 15921 - DNA, 22 bp, synthetic construct
  misc_feature 1..22: note = Synthetic construct
  source 1..22: mol_type = other DNA
atctaacttgatgttattaccg

SEQ ID NO: 15922 - DNA, 22 bp, synthetic construct
  misc_feature 1..22: note = Synthetic construct
  source 1..22: mol_type = other DNA
atctaacttgatgttagaaccg

SEQ ID NO: 15923 - DNA, 22 bp, synthetic construct
  misc_feature 1..22: note = Synthetic construct
  source 1..22: mol_type = other DNA
atctaacttgatgttagcaccg

SEQ ID NO: 15924 - DNA, 22 bp, synthetic construct
  misc_feature 1..22: note = Synthetic construct
  source 1..22: mol_type = other DNA
atctaacttgatgttaggaccg

SEQ ID NO: 15925 - DNA, 22 bp, synthetic construct
  misc_feature 1..22: note = Synthetic construct
  source 1..22: mol_type = other DNA
atctaacttgatgttagtcccg

SEQ ID NO: 15926 - DNA, 22 bp, synthetic construct
  misc_feature 1..22: note = Synthetic construct
  source 1..22: mol_type = other DNA
atctaacttgatgttagtgccg

SEQ ID NO: 15927 - DNA, 22 bp, synthetic construct
  misc_feature 1..22: note = Synthetic construct
  source 1..22: mol_type = other DNA
atctaacttgatgttagttccg

SEQ ID NO: 15928 - DNA, 22 bp, synthetic construct
  misc_feature 1..22: note = Synthetic construct
  source 1..22: mol_type = other DNA
atctaacttgatgttagtaacg

SEQ ID NO: 15929 - DNA, 22 bp, synthetic construct
  misc_feature 1..22: note = Synthetic construct
  source 1..22: mol_type = other DNA
atctaacttgatgttagtagcg

SEQ ID NO: 15930 - DNA, 22 bp, synthetic construct
  misc_feature 1..22: note = Synthetic construct
  source 1..22: mol_type = other DNA
atctaacttgatgttagtatcg

SEQ ID NO: 15931 - DNA, 22 bp, synthetic construct
  misc_feature 1..22: note = Synthetic construct
  source 1..22: mol_type = other DNA
atctaacttgatgttagtacag

SEQ ID NO: 15932 - DNA, 22 bp, synthetic construct
  misc_feature 1..22: note = Synthetic construct
  source 1..22: mol_type = other DNA
atctaacttgatgttagtacgg

SEQ ID NO: 15933 - DNA, 22 bp, synthetic construct
  misc_feature 1..22: note = Synthetic construct
  source 1..22: mol_type = other DNA
atctaacttgatgttagtactg

SEQ ID NO: 15934 - DNA, 22 bp, synthetic construct
  misc_feature 1..22: note = Synthetic construct
  source 1..22: mol_type = other DNA
atctaacttgatgttagtacca

SEQ ID NO: 15935 - DNA, 22 bp, synthetic construct
  misc_feature 1..22: note = Synthetic construct
  source 1..22: mol_type = other DNA
atctaacttgatgttagtaccc

SEQ ID NO: 15936 - DNA, 22 bp, synthetic construct
  misc_feature 1..22: note = Synthetic construct
  source 1..22: mol_type = other DNA
atctaacttgatgttagtacct

SEQ ID NO: 15937 - DNA, 22 bp, synthetic construct
  misc_feature 1..22: note = Synthetic construct
  source 1..22: mol_type = other DNA
ccgtacggctctcataggaaga

SEQ ID NO: 15938 - DNA, 22 bp, synthetic construct
  misc_feature 1..22: note = Synthetic construct
  source 1..22: mol_type = other DNA
gcgtacggctctcataggaaga

SEQ ID NO: 15939 - DNA, 22 bp, synthetic construct
  misc_feature 1..22: note = Synthetic construct
  source 1..22: mol_type = other DNA
tcgtacggctctcataggaaga

SEQ ID NO: 15940 - DNA, 22 bp, synthetic construct
  misc_feature 1..22: note = Synthetic construct
  source 1..22: mol_type = other DNA
aagtacggctctcataggaaga

SEQ ID NO: 15941 - DNA, 22 bp, synthetic construct
  misc_feature 1..22: note = Synthetic construct
  source 1..22: mol_type = other DNA
aggtacggctctcataggaaga

SEQ ID NO: 15942 - DNA, 22 bp, synthetic construct
  misc_feature 1..22: note = Synthetic construct
  source 1..22: mol_type = other DNA
atgtacggctctcataggaaga

SEQ ID NO: 15943 - DNA, 22 bp, synthetic construct
  misc_feature 1..22: note = Synthetic construct
  source 1..22: mol_type = other DNA
acatacggctctcataggaaga

SEQ ID NO: 15944 - DNA, 22 bp, synthetic construct
  misc_feature 1..22: note = Synthetic construct
  source 1..22: mol_type = other DNA
acctacggctctcataggaaga

SEQ ID NO: 15945 - DNA, 22 bp, synthetic construct
  misc_feature 1..22: note = Synthetic construct
  source 1..22: mol_type = other DNA
acttacggctctcataggaaga

SEQ ID NO: 15946 - DNA, 22 bp, synthetic construct
  misc_feature 1..22: note = Synthetic construct
  source 1..22: mol_type = other DNA
acgaacggctctcataggaaga

SEQ ID NO: 15947 - DNA, 22 bp, synthetic construct
  misc_feature 1..22: note = Synthetic construct
  source 1..22: mol_type = other DNA
acgcacggctctcataggaaga

SEQ ID NO: 15948 - DNA, 22 bp, synthetic construct
  misc_feature 1..22: note = Synthetic construct
  source 1..22: mol_type = other DNA
acggacggctctcataggaaga

SEQ ID NO: 15949 - DNA, 22 bp, synthetic construct
  misc_feature 1..22: note = Synthetic construct
  source 1..22: mol_type = other DNA
acgtccggctctcataggaaga

SEQ ID NO: 15950 - DNA, 22 bp, synthetic construct
  misc_feature 1..22: note = Synthetic construct
  source 1..22: mol_type = other DNA
acgtgcggctctcataggaaga

SEQ ID NO: 15951 - DNA, 22 bp, synthetic construct
  misc_feature 1..22: note = Synthetic construct
  source 1..22: mol_type = other DNA
acgttcggctctcataggaaga

SEQ ID NO: 15952 - DNA, 22 bp, synthetic construct
  misc_feature 1..22: note = Synthetic construct
  source 1..22: mol_type = other DNA
acgtaaggctctcataggaaga

SEQ ID NO: 15953 - DNA, 22 bp, synthetic construct
  misc_feature 1..22: note = Synthetic construct
  source 1..22: mol_type = other DNA
acgtagggctctcataggaaga

SEQ ID NO: 15954 - DNA, 22 bp, synthetic construct
  misc_feature 1..22: note = Synthetic construct
  source 1..22: mol_type = other DNA
acgtatggctctcataggaaga

SEQ ID NO: 15955 - DNA, 22 bp, synthetic construct
  misc_feature 1..22: note = Synthetic construct
  source 1..22: mol_type = other DNA
acgtacagctctcataggaaga

SEQ ID NO: 15956 - DNA, 22 bp, synthetic construct
  misc_feature 1..22: note = Synthetic construct
  source 1..22: mol_type = other DNA
acgtaccgctctcataggaaga

SEQ ID NO: 15957 - DNA, 22 bp, synthetic construct
  misc_feature 1..22: note = Synthetic construct
  source 1..22: mol_type = other DNA
acgtactgctctcataggaaga

SEQ ID NO: 15958 - DNA, 22 bp, synthetic construct
  misc_feature 1..22: note = Synthetic construct
  source 1..22: mol_type = other DNA
acgtacgactctcataggaaga

SEQ ID NO: 15959 - DNA, 22 bp, synthetic construct
  misc_feature 1..22: note = Synthetic construct
  source 1..22: mol_type = other DNA
acgtacgcctctcataggaaga

SEQ ID NO: 15960 - DNA, 22 bp, synthetic construct
  misc_feature 1..22: note = Synthetic construct
  source 1..22: mol_type = other DNA
acgtacgtctctcataggaaga

SEQ ID NO: 15961 - DNA, 22 bp, synthetic construct
  misc_feature 1..22: note = Synthetic construct
  source 1..22: mol_type = other DNA
acgtacggatctcataggaaga

SEQ ID NO: 15962 - DNA, 22 bp, synthetic construct
  misc_feature 1..22: note = Synthetic construct
  source 1..22: mol_type = other DNA
acgtacgggtctcataggaaga

SEQ ID NO: 15963 - DNA, 22 bp, synthetic construct
  misc_feature 1..22: note = Synthetic construct
  source 1..22: mol_type = other DNA
acgtacggttctcataggaaga

SEQ ID NO: 15964 - DNA, 22 bp, synthetic construct
  misc_feature 1..22: note = Synthetic construct
  source 1..22: mol_type = other DNA
acgtacggcactcataggaaga

SEQ ID NO: 15965 - DNA, 22 bp, synthetic construct
  misc_feature 1..22: note = Synthetic construct
  source 1..22: mol_type = other DNA
acgtacggccctcataggaaga

SEQ ID NO: 15966 - DNA, 22 bp, synthetic construct
  misc_feature 1..22: note = Synthetic construct
  source 1..22: mol_type = other DNA
acgtacggcgctcataggaaga

SEQ ID NO: 15967 - DNA, 22 bp, synthetic construct
  misc_feature 1..22: note = Synthetic construct
  source 1..22: mol_type = other DNA
acgtacggctatcataggaaga

SEQ ID NO: 15968 - DNA, 22 bp, synthetic construct
  misc_feature 1..22: note = Synthetic construct
  source 1..22: mol_type = other DNA
acgtacggctgtcataggaaga

SEQ ID NO: 15969 - DNA, 22 bp, synthetic construct
  misc_feature 1..22: note = Synthetic construct
  source 1..22: mol_type = other DNA
acgtacggctttcataggaaga

SEQ ID NO: 15970 - DNA, 22 bp, synthetic construct
  misc_feature 1..22: note = Synthetic construct
  source 1..22: mol_type = other DNA
acgtacggctcacataggaaga

SEQ ID NO: 15971 - DNA, 22 bp, synthetic construct
  misc_feature 1..22: note = Synthetic construct
  source 1..22: mol_type = other DNA
acgtacggctcccataggaaga

SEQ ID NO: 15972 - DNA, 22 bp, synthetic construct
  misc_feature 1..22: note = Synthetic construct
  source 1..22: mol_type = other DNA
acgtacggctcgcataggaaga

SEQ ID NO: 15973 - DNA, 22 bp, synthetic construct
  misc_feature 1..22: note = Synthetic construct
  source 1..22: mol_type = other DNA
acgtacggctctaataggaaga

SEQ ID NO: 15974 - DNA, 22 bp, synthetic construct
  misc_feature 1..22: note = Synthetic construct
  source 1..22: mol_type = other DNA
acgtacggctctgataggaaga

SEQ ID NO: 15975 - DNA, 22 bp, synthetic construct
  misc_feature 1..22: note = Synthetic construct
  source 1..22: mol_type = other DNA
acgtacggctcttataggaaga

SEQ ID NO: 15976 - DNA, 22 bp, synthetic construct
  misc_feature 1..22: note = Synthetic construct
  source 1..22: mol_type = other DNA
acgtacggctctcctaggaaga

SEQ ID NO: 15977 - DNA, 22 bp, synthetic construct
  misc_feature 1..22: note = Synthetic construct
  source 1..22: mol_type = other DNA
acgtacggctctcgtaggaaga

SEQ ID NO: 15978 - DNA, 22 bp, synthetic construct
  misc_feature 1..22: note = Synthetic construct
  source 1..22: mol_type = other DNA
acgtacggctctcttaggaaga

SEQ ID NO: 15979 - DNA, 22 bp, synthetic construct
  misc_feature 1..22: note = Synthetic construct
  source 1..22: mol_type = other DNA
acgtacggctctcaaaggaaga

SEQ ID NO: 15980 - DNA, 22 bp, synthetic construct
  misc_feature 1..22: note = Synthetic construct
  source 1..22: mol_type = other DNA
acgtacggctctcacaggaaga

SEQ ID NO: 15981 - DNA, 22 bp, synthetic construct
  misc_feature 1..22: note = Synthetic construct
  source 1..22: mol_type = other DNA
acgtacggctctcagaggaaga

SEQ ID NO: 15982 - DNA, 22 bp, synthetic construct
  misc_feature 1..22: note = Synthetic construct
  source 1..22: mol_type = other DNA
acgtacggctctcatcggaaga

SEQ ID NO: 15983 - DNA, 22 bp, synthetic construct
  misc_feature 1..22: note = Synthetic construct
  source 1..22: mol_type = other DNA
acgtacggctctcatgggaaga

SEQ ID NO: 15984 - DNA, 22 bp, synthetic construct
  misc_feature 1..22: note = Synthetic construct
  source 1..22: mol_type = other DNA
acgtacggctctcattggaaga

SEQ ID NO: 15985 - DNA, 22 bp, synthetic construct
  misc_feature 1..22: note = Synthetic construct
  source 1..22: mol_type = other DNA
acgtacggctctcataagaaga

SEQ ID NO: 15986 - DNA, 22 bp, synthetic construct
  misc_feature 1..22: note = Synthetic construct
  source 1..22: mol_type = other DNA
acgtacggctctcatacgaaga

SEQ ID NO: 15987 - DNA, 22 bp, synthetic construct
  misc_feature 1..22: note = Synthetic construct
  source 1..22: mol_type = other DNA
acgtacggctctcatatgaaga

SEQ ID NO: 15988 - DNA, 22 bp, synthetic construct
  misc_feature 1..22: note = Synthetic construct
  source 1..22: mol_type = other DNA
acgtacggctctcatagaaaga

SEQ ID NO: 15989 - DNA, 22 bp, synthetic construct
  misc_feature 1..22: note = Synthetic construct
  source 1..22: mol_type = other DNA
acgtacggctctcatagcaaga

SEQ ID NO: 15990 - DNA, 22 bp, synthetic construct
  misc_feature 1..22: note = Synthetic construct
  source 1..22: mol_type = other DNA
acgtacggctctcatagtaaga

SEQ ID NO: 15991 - DNA, 22 bp, synthetic construct
  misc_feature 1..22: note = Synthetic construct
  source 1..22: mol_type = other DNA
acgtacggctctcataggcaga

SEQ ID NO: 15992 - DNA, 22 bp, synthetic construct
  misc_feature 1..22: note = Synthetic construct
  source 1..22: mol_type = other DNA
acgtacggctctcatagggaga

SEQ ID NO: 15993 - DNA, 22 bp, synthetic construct
  misc_feature 1..22: note = Synthetic construct
  source 1..22: mol_type = other DNA
acgtacggctctcataggtaga

SEQ ID NO: 15994 - DNA, 22 bp, synthetic construct
  misc_feature 1..22: note = Synthetic construct
  source 1..22: mol_type = other DNA
acgtacggctctcataggacga

SEQ ID NO: 15995 - DNA, 22 bp, synthetic construct
  misc_feature 1..22: note = Synthetic construct
  source 1..22: mol_type = other DNA
acgtacggctctcataggagga

SEQ ID NO: 15996 - DNA, 22 bp, synthetic construct
  misc_feature 1..22: note = Synthetic construct
  source 1..22: mol_type = other DNA
acgtacggctctcataggatga

SEQ ID NO: 15997 - DNA, 22 bp, synthetic construct
  misc_feature 1..22: note = Synthetic construct
  source 1..22: mol_type = other DNA
acgtacggctctcataggaaaa

SEQ ID NO: 15998 - DNA, 22 bp, synthetic construct
  misc_feature 1..22: note = Synthetic construct
  source 1..22: mol_type = other DNA
acgtacggctctcataggaaca

SEQ ID NO: 15999 - DNA, 22 bp, synthetic construct
  misc_feature 1..22: note = Synthetic construct
  source 1..22: mol_type = other DNA
acgtacggctctcataggaata

SEQ ID NO: 16000 - DNA, 22 bp, synthetic construct
  misc_feature 1..22: note = Synthetic construct
  source 1..22: mol_type = other DNA
acgtacggctctcataggaagc

SEQ ID NO: 16001 - DNA, 22 bp, synthetic construct
  misc_feature 1..22: note = Synthetic construct
  source 1..22: mol_type = other DNA
acgtacggctctcataggaagg

SEQ ID NO: 16002 - DNA, 22 bp, synthetic construct
  misc_feature 1..22: note = Synthetic construct
  source 1..22: mol_type = other DNA
acgtacggctctcataggaagt

SEQ ID NO: 16003 - DNA, 22 bp, synthetic construct
  misc_feature 1..22: note = Synthetic construct
  source 1..22: mol_type = other DNA
agctgtagcaggagcgtgcgtc

SEQ ID NO: 16004 - DNA, 22 bp, synthetic construct
  misc_feature 1..22: note = Synthetic construct
  source 1..22: mol_type = other DNA
cgctgtagcaggagcgtgcgtc

SEQ ID NO: 16005 - DNA, 22 bp, synthetic construct
  misc_feature 1..22: note = Synthetic construct
  source 1..22: mol_type = other DNA
tgctgtagcaggagcgtgcgtc

SEQ ID NO: 16006 - DNA, 22 bp, synthetic construct
  misc_feature 1..22: note = Synthetic construct
  source 1..22: mol_type = other DNA
gactgtagcaggagcgtgcgtc

SEQ ID NO: 16007 - DNA, 22 bp, synthetic construct
  misc_feature 1..22: note = Synthetic construct
  source 1..22: mol_type = other DNA
gcctgtagcaggagcgtgcgtc

SEQ ID NO: 16008 - DNA, 22 bp, synthetic construct
  misc_feature 1..22: note = Synthetic construct
  source 1..22: mol_type = other DNA
gtctgtagcaggagcgtgcgtc

SEQ ID NO: 16009 - DNA, 22 bp, synthetic construct
  misc_feature 1..22: note = Synthetic construct
  source 1..22: mol_type = other DNA
ggatgtagcaggagcgtgcgtc

SEQ ID NO: 16010 - DNA, 22 bp, synthetic construct
  misc_feature 1..22: note = Synthetic construct
  source 1..22: mol_type = other DNA
gggtgtagcaggagcgtgcgtc

SEQ ID NO: 16011 - DNA, 22 bp, synthetic construct
  misc_feature 1..22: note = Synthetic construct
  source 1..22: mol_type = other DNA
ggttgtagcaggagcgtgcgtc

SEQ ID NO: 16012 - DNA, 22 bp, synthetic construct
  misc_feature 1..22: note = Synthetic construct
  source 1..22: mol_type = other DNA
ggcagtagcaggagcgtgcgtc

SEQ ID NO: 16013 - DNA, 22 bp, synthetic construct
  misc_feature 1..22: note = Synthetic construct
  source 1..22: mol_type = other DNA
ggccgtagcaggagcgtgcgtc

SEQ ID NO: 16014 - DNA, 22 bp, synthetic construct
  misc_feature 1..22: note = Synthetic construct
  source 1..22: mol_type = other DNA
ggcggtagcaggagcgtgcgtc

SEQ ID NO: 16015 - DNA, 22 bp, synthetic construct
  misc_feature 1..22: note = Synthetic construct
  source 1..22: mol_type = other DNA
ggctatagcaggagcgtgcgtc

SEQ ID NO: 16016 - DNA, 22 bp, synthetic construct
  misc_feature 1..22: note = Synthetic construct
  source 1..22: mol_type = other DNA
ggctctagcaggagcgtgcgtc

SEQ ID NO: 16017 - DNA, 22 bp, synthetic construct
  misc_feature 1..22: note = Synthetic construct
  source 1..22: mol_type = other DNA
ggctttagcaggagcgtgcgtc

SEQ ID NO: 16018 - DNA, 22 bp, synthetic construct
  misc_feature 1..22: note = Synthetic construct
  source 1..22: mol_type = other DNA
ggctgaagcaggagcgtgcgtc

SEQ ID NO: 16019 - DNA, 22 bp, synthetic construct
  misc_feature 1..22: note = Synthetic construct
  source 1..22: mol_type = other DNA
ggctgcagcaggagcgtgcgtc

SEQ ID NO: 16020 - DNA, 22 bp, synthetic construct
  misc_feature 1..22: note = Synthetic construct
  source 1..22: mol_type = other DNA
ggctggagcaggagcgtgcgtc

SEQ ID NO: 16021 - DNA, 22 bp, synthetic construct
  misc_feature 1..22: note = Synthetic construct
  source 1..22: mol_type = other DNA
ggctgtcgcaggagcgtgcgtc

SEQ ID NO: 16022 - DNA, 22 bp, synthetic construct
  misc_feature 1..22: note = Synthetic construct
  source 1..22: mol_type = other DNA
ggctgtggcaggagcgtgcgtc

SEQ ID NO: 16023 - DNA, 22 bp, synthetic construct
  misc_feature 1..22: note = Synthetic construct
  source 1..22: mol_type = other DNA
ggctgttgcaggagcgtgcgtc

SEQ ID NO: 16024 - DNA, 22 bp, synthetic construct
  misc_feature 1..22: note = Synthetic construct
  source 1..22: mol_type = other DNA
ggctgtaacaggagcgtgcgtc

SEQ ID NO: 16025 - DNA, 22 bp, synthetic construct
  misc_feature 1..22: note = Synthetic construct
  source 1..22: mol_type = other DNA
ggctgtaccaggagcgtgcgtc

SEQ ID NO: 16026 - DNA, 22 bp, synthetic construct
  misc_feature 1..22: note = Synthetic construct
  source 1..22: mol_type = other DNA
ggctgtatcaggagcgtgcgtc

SEQ ID NO: 16027 - DNA, 22 bp, synthetic construct
  misc_feature 1..22: note = Synthetic construct
  source 1..22: mol_type = other DNA
ggctgtagaaggagcgtgcgtc

SEQ ID NO: 16028 - DNA, 22 bp, synthetic construct
  misc_feature 1..22: note = Synthetic construct
  source 1..22: mol_type = other DNA
ggctgtaggaggagcgtgcgtc

SEQ ID NO: 16029 - DNA, 22 bp, synthetic construct
  misc_feature 1..22: note = Synthetic construct
  source 1..22: mol_type = other DNA
ggctgtagtaggagcgtgcgtc

SEQ ID NO: 16030 - DNA, 22 bp, synthetic construct
  misc_feature 1..22: note = Synthetic construct
  source 1..22: mol_type = other DNA
ggctgtagccggagcgtgcgtc

SEQ ID NO: 16031 - DNA, 22 bp, synthetic construct
  misc_feature 1..22: note = Synthetic construct
  source 1..22: mol_type = other DNA
ggctgtagcgggagcgtgcgtc

SEQ ID NO: 16032 - DNA, 22 bp, synthetic construct
  misc_feature 1..22: note = Synthetic construct
  source 1..22: mol_type = other DNA
ggctgtagctggagcgtgcgtc

SEQ ID NO: 16033 - DNA, 22 bp, synthetic construct
  misc_feature 1..22: note = Synthetic construct
  source 1..22: mol_type = other DNA
ggctgtagcaagagcgtgcgtc

SEQ ID NO: 16034 - DNA, 22 bp, synthetic construct
  misc_feature 1..22: note = Synthetic construct
  source 1..22: mol_type = other DNA
ggctgtagcacgagcgtgcgtc

SEQ ID NO: 16035 - DNA, 22 bp, synthetic construct
  misc_feature 1..22: note = Synthetic construct
  source 1..22: mol_type = other DNA
ggctgtagcatgagcgtgcgtc

SEQ ID NO: 16036 - DNA, 22 bp, synthetic construct
  misc_feature 1..22: note = Synthetic construct
  source 1..22: mol_type = other DNA
ggctgtagcagaagcgtgcgtc

SEQ ID NO: 16037 - DNA, 22 bp, synthetic construct
  misc_feature 1..22: note = Synthetic construct
  source 1..22: mol_type = other DNA
ggctgtagcagcagcgtgcgtc

SEQ ID NO: 16038 - DNA, 22 bp, synthetic construct
  misc_feature 1..22: note = Synthetic construct
  source 1..22: mol_type = other DNA
ggctgtagcagtagcgtgcgtc

SEQ ID NO: 16039 - DNA, 22 bp, synthetic construct
  misc_feature 1..22: note = Synthetic construct
  source 1..22: mol_type = other DNA
ggctgtagcaggcgcgtgcgtc

SEQ ID NO: 16040 - DNA, 22 bp, synthetic construct
  misc_feature 1..22: note = Synthetic construct
  source 1..22: mol_type = other DNA
ggctgtagcaggggcgtgcgtc

SEQ ID NO: 16041 - DNA, 22 bp, synthetic construct
  misc_feature 1..22: note = Synthetic construct
  source 1..22: mol_type = other DNA
ggctgtagcaggtgcgtgcgtc

SEQ ID NO: 16042 - DNA, 22 bp, synthetic construct
  misc_feature 1..22: note = Synthetic construct
  source 1..22: mol_type = other DNA
ggctgtagcaggaacgtgcgtc

SEQ ID NO: 16043 - DNA, 22 bp, synthetic construct
  misc_feature 1..22: note = Synthetic construct
  source 1..22: mol_type = other DNA
ggctgtagcaggaccgtgcgtc

SEQ ID NO: 16044 - DNA, 22 bp, synthetic construct
  misc_feature 1..22: note = Synthetic construct
  source 1..22: mol_type = other DNA
ggctgtagcaggatcgtgcgtc

SEQ ID NO: 16045 - DNA, 22 bp, synthetic construct
  misc_feature 1..22: note = Synthetic construct
  source 1..22: mol_type = other DNA
ggctgtagcaggagagtgcgtc

SEQ ID NO: 16046 - DNA, 22 bp, synthetic construct
  misc_feature 1..22: note = Synthetic construct
  source 1..22: mol_type = other DNA
ggctgtagcaggagggtgcgtc

SEQ ID NO: 16047 - DNA, 22 bp, synthetic construct
  misc_feature 1..22: note = Synthetic construct
  source 1..22: mol_type = other DNA
ggctgtagcaggagtgtgcgtc

SEQ ID NO: 16048 - DNA, 22 bp, synthetic construct
  misc_feature 1..22: note = Synthetic construct
  source 1..22: mol_type = other DNA
ggctgtagcaggagcatgcgtc

SEQ ID NO: 16049 - DNA, 22 bp, synthetic construct
  misc_feature 1..22: note = Synthetic construct
  source 1..22: mol_type = other DNA
ggctgtagcaggagcctgcgtc

SEQ ID NO: 16050 - DNA, 22 bp, synthetic construct
  misc_feature 1..22: note = Synthetic construct
  source 1..22: mol_type = other DNA
ggctgtagcaggagcttgcgtc

SEQ ID NO: 16051 - DNA, 22 bp, synthetic construct
  misc_feature 1..22: note = Synthetic construct
  source 1..22: mol_type = other DNA
ggctgtagcaggagcgagcgtc

SEQ ID NO: 16052 - DNA, 22 bp, synthetic construct
  misc_feature 1..22: note = Synthetic construct
  source 1..22: mol_type = other DNA
ggctgtagcaggagcgcgcgtc

SEQ ID NO: 16053 - DNA, 22 bp, synthetic construct
  misc_feature 1..22: note = Synthetic construct
  source 1..22: mol_type = other DNA
ggctgtagcaggagcgggcgtc

SEQ ID NO: 16054 - DNA, 22 bp, synthetic construct
  misc_feature 1..22: note = Synthetic construct
  source 1..22: mol_type = other DNA
ggctgtagcaggagcgtacgtc

SEQ ID NO: 16055 - DNA, 22 bp, synthetic construct
  misc_feature 1..22: note = Synthetic construct
  source 1..22: mol_type = other DNA
ggctgtagcaggagcgtccgtc

SEQ ID NO: 16056 - DNA, 22 bp, synthetic construct
  misc_feature 1..22: note = Synthetic construct
  source 1..22: mol_type = other DNA
ggctgtagcaggagcgttcgtc

SEQ ID NO: 16057 - DNA, 22 bp, synthetic construct
  misc_feature 1..22: note = Synthetic construct
  source 1..22: mol_type = other DNA
ggctgtagcaggagcgtgagtc

SEQ ID NO: 16058 - DNA, 22 bp, synthetic construct
  misc_feature 1..22: note = Synthetic construct
  source 1..22: mol_type = other DNA
ggctgtagcaggagcgtgggtc

SEQ ID NO: 16059 - DNA, 22 bp, synthetic construct
  misc_feature 1..22: note = Synthetic construct
  source 1..22: mol_type = other DNA
ggctgtagcaggagcgtgtgtc

SEQ ID NO: 16060 - DNA, 22 bp, synthetic construct
  misc_feature 1..22: note = Synthetic construct
  source 1..22: mol_type = other DNA
ggctgtagcaggagcgtgcatc

SEQ ID NO: 16061 - DNA, 22 bp, synthetic construct
  misc_feature 1..22: note = Synthetic construct
  source 1..22: mol_type = other DNA
ggctgtagcaggagcgtgcctc

SEQ ID NO: 16062 - DNA, 22 bp, synthetic construct
  misc_feature 1..22: note = Synthetic construct
  source 1..22: mol_type = other DNA
ggctgtagcaggagcgtgcttc

SEQ ID NO: 16063 - DNA, 22 bp, synthetic construct
  misc_feature 1..22: note = Synthetic construct
  source 1..22: mol_type = other DNA
ggctgtagcaggagcgtgcgac

SEQ ID NO: 16064 - DNA, 22 bp, synthetic construct
  misc_feature 1..22: note = Synthetic construct
  source 1..22: mol_type = other DNA
ggctgtagcaggagcgtgcgcc

SEQ ID NO: 16065 - DNA, 22 bp, synthetic construct
  misc_feature 1..22: note = Synthetic construct
  source 1..22: mol_type = other DNA
ggctgtagcaggagcgtgcggc

SEQ ID NO: 16066 - DNA, 22 bp, synthetic construct
  misc_feature 1..22: note = Synthetic construct
  source 1..22: mol_type = other DNA
ggctgtagcaggagcgtgcgta

SEQ ID NO: 16067 - DNA, 22 bp, synthetic construct
  misc_feature 1..22: note = Synthetic construct
  source 1..22: mol_type = other DNA
ggctgtagcaggagcgtgcgtg

SEQ ID NO: 16068 - DNA, 22 bp, synthetic construct
  misc_feature 1..22: note = Synthetic construct
  source 1..22: mol_type = other DNA
ggctgtagcaggagcgtgcgtt

SEQ ID NO: 16069 - DNA, 21 bp, synthetic construct
  misc_feature 1..21: note = Synthetic construct
  source 1..21: mol_type = other DNA
atcgcgaaagagcccggacac

SEQ ID NO: 16070 - DNA, 21 bp, synthetic construct
  misc_feature 1..21: note = Synthetic construct
  source 1..21: mol_type = other DNA
gtcgcgaaagagcccggacac

SEQ ID NO: 16071 - DNA, 21 bp, synthetic construct
  misc_feature 1..21: note = Synthetic construct
  source 1..21: mol_type = other DNA
ttcgcgaaagagcccggacac

SEQ ID NO: 16072 - DNA, 21 bp, synthetic construct
  misc_feature 1..21: note = Synthetic construct
  source 1..21: mol_type = other DNA
cacgcgaaagagcccggacac

SEQ ID NO: 16073 - DNA, 21 bp, synthetic construct
  misc_feature 1..21: note = Synthetic construct
  source 1..21: mol_type = other DNA
cccgcgaaagagcccggacac

SEQ ID NO: 16074 - DNA, 21 bp, synthetic construct
  misc_feature 1..21: note = Synthetic construct
  source 1..21: mol_type = other DNA
cgcgcgaaagagcccggacac

SEQ ID NO: 16075 - DNA, 21 bp, synthetic construct
  misc_feature 1..21: note = Synthetic construct
  source 1..21: mol_type = other DNA
ctagcgaaagagcccggacac

SEQ ID NO: 16076 - DNA, 21 bp, synthetic construct
  misc_feature 1..21: note = Synthetic construct
  source 1..21: mol_type = other DNA
ctggcgaaagagcccggacac

SEQ ID NO: 16077 - DNA, 21 bp, synthetic construct
  misc_feature 1..21: note = Synthetic construct
  source 1..21: mol_type = other DNA
cttgcgaaagagcccggacac

SEQ ID NO: 16078 - DNA, 21 bp, synthetic construct
  misc_feature 1..21: note = Synthetic construct
  source 1..21: mol_type = other DNA
ctcacgaaagagcccggacac

SEQ ID NO: 16079 - DNA, 21 bp, synthetic construct
  misc_feature 1..21: note = Synthetic construct
  source 1..21: mol_type = other DNA
ctcccgaaagagcccggacac

SEQ ID NO: 16080 - DNA, 21 bp, synthetic construct
  misc_feature 1..21: note = Synthetic construct
  source 1..21: mol_type = other DNA
ctctcgaaagagcccggacac

SEQ ID NO: 16081 - DNA, 21 bp, synthetic construct
  misc_feature 1..21: note = Synthetic construct
  source 1..21: mol_type = other DNA
ctcgagaaagagcccggacac

SEQ ID NO: 16082 - DNA, 21 bp, synthetic construct
  misc_feature 1..21: note = Synthetic construct
  source 1..21: mol_type = other DNA
ctcgggaaagagcccggacac

SEQ ID NO: 16083 - DNA, 21 bp, synthetic construct
  misc_feature 1..21: note = Synthetic construct
  source 1..21: mol_type = other DNA
ctcgtgaaagagcccggacac

SEQ ID NO: 16084 - DNA, 21 bp, synthetic construct
  misc_feature 1..21: note = Synthetic construct
  source 1..21: mol_type = other DNA
ctcgcaaaagagcccggacac

SEQ ID NO: 16085 - DNA, 21 bp, synthetic construct
  misc_feature 1..21: note = Synthetic construct
  source 1..21: mol_type = other DNA
ctcgccaaagagcccggacac

SEQ ID NO: 16086 - DNA, 21 bp, synthetic construct
  misc_feature 1..21: note = Synthetic construct
  source 1..21: mol_type = other DNA
ctcgctaaagagcccggacac

SEQ ID NO: 16087 - DNA, 21 bp, synthetic construct
  misc_feature 1..21: note = Synthetic construct
  source 1..21: mol_type = other DNA
ctcgcgcaagagcccggacac

SEQ ID NO: 16088 - DNA, 21 bp, synthetic construct
  misc_feature 1..21: note = Synthetic construct
  source 1..21: mol_type = other DNA
ctcgcggaagagcccggacac

SEQ ID NO: 16089 - DNA, 21 bp, synthetic construct
  misc_feature 1..21: note = Synthetic construct
  source 1..21: mol_type = other DNA
ctcgcgtaagagcccggacac

SEQ ID NO: 16090 - DNA, 21 bp, synthetic construct
  misc_feature 1..21: note = Synthetic construct
  source 1..21: mol_type = other DNA
ctcgcgacagagcccggacac

SEQ ID NO: 16091 - DNA, 21 bp, synthetic construct
  misc_feature 1..21: note = Synthetic construct
  source 1..21: mol_type = other DNA
ctcgcgagagagcccggacac

SEQ ID NO: 16092 - DNA, 21 bp, synthetic construct
  misc_feature 1..21: note = Synthetic construct
  source 1..21: mol_type = other DNA
ctcgcgatagagcccggacac

SEQ ID NO: 16093 - DNA, 21 bp, synthetic construct
  misc_feature 1..21: note = Synthetic construct
  source 1..21: mol_type = other DNA
ctcgcgaacgagcccggacac

SEQ ID NO: 16094 - DNA, 21 bp, synthetic construct
  misc_feature 1..21: note = Synthetic construct
  source 1..21: mol_type = other DNA
ctcgcgaaggagcccggacac

SEQ ID NO: 16095 - DNA, 21 bp, synthetic construct
  misc_feature 1..21: note = Synthetic construct
  source 1..21: mol_type = other DNA
ctcgcgaatgagcccggacac

SEQ ID NO: 16096 - DNA, 21 bp, synthetic construct
  misc_feature 1..21: note = Synthetic construct
  source 1..21: mol_type = other DNA
ctcgcgaaaaagcccggacac

SEQ ID NO: 16097 - DNA, 21 bp, synthetic construct
  misc_feature 1..21: note = Synthetic construct
  source 1..21: mol_type = other DNA
ctcgcgaaacagcccggacac

SEQ ID NO: 16098 - DNA, 21 bp, synthetic construct
  misc_feature 1..21: note = Synthetic construct
  source 1..21: mol_type = other DNA
ctcgcgaaatagcccggacac

SEQ ID NO: 16099 - DNA, 21 bp, synthetic construct
  misc_feature 1..21: note = Synthetic construct
  source 1..21: mol_type = other DNA
ctcgcgaaagcgcccggacac

SEQ ID NO: 16100 - DNA, 21 bp, synthetic construct
  misc_feature 1..21: note = Synthetic construct
  source 1..21: mol_type = other DNA
ctcgcgaaagggcccggacac

SEQ ID NO: 16101 - DNA, 21 bp, synthetic construct
  misc_feature 1..21: note = Synthetic construct
  source 1..21: mol_type = other DNA
ctcgcgaaagtgcccggacac

SEQ ID NO: 16102 - DNA, 21 bp, synthetic construct
  misc_feature 1..21: note = Synthetic construct
  source 1..21: mol_type = other DNA
ctcgcgaaagaacccggacac

SEQ ID NO: 16103 - DNA, 21 bp, synthetic construct
  misc_feature 1..21: note = Synthetic construct
  source 1..21: mol_type = other DNA
ctcgcgaaagaccccggacac

SEQ ID NO: 16104 - DNA, 21 bp, synthetic construct
  misc_feature 1..21: note = Synthetic construct
  source 1..21: mol_type = other DNA
ctcgcgaaagatcccggacac

SEQ ID NO: 16105 - DNA, 21 bp, synthetic construct
  misc_feature 1..21: note = Synthetic construct
  source 1..21: mol_type = other DNA
ctcgcgaaagagaccggacac

SEQ ID NO: 16106 - DNA, 21 bp, synthetic construct
  misc_feature 1..21: note = Synthetic construct
  source 1..21: mol_type = other DNA
ctcgcgaaagaggccggacac

SEQ ID NO: 16107 - DNA, 21 bp, synthetic construct
  misc_feature 1..21: note = Synthetic construct
  source 1..21: mol_type = other DNA
ctcgcgaaagagtccggacac

SEQ ID NO: 16108 - DNA, 21 bp, synthetic construct
  misc_feature 1..21: note = Synthetic construct
  source 1..21: mol_type = other DNA
ctcgcgaaagagcacggacac

SEQ ID NO: 16109 - DNA, 21 bp, synthetic construct
  misc_feature 1..21: note = Synthetic construct
  source 1..21: mol_type = other DNA
ctcgcgaaagagcgcggacac

SEQ ID NO: 16110 - DNA, 21 bp, synthetic construct
  misc_feature 1..21: note = Synthetic construct
  source 1..21: mol_type = other DNA
ctcgcgaaagagctcggacac

SEQ ID NO: 16111 - DNA, 21 bp, synthetic construct
  misc_feature 1..21: note = Synthetic construct
  source 1..21: mol_type = other DNA
ctcgcgaaagagccaggacac

SEQ ID NO: 16112 - DNA, 21 bp, synthetic construct
  misc_feature 1..21: note = Synthetic construct
  source 1..21: mol_type = other DNA
ctcgcgaaagagccgggacac

SEQ ID NO: 16113 - DNA, 21 bp, synthetic construct
  misc_feature 1..21: note = Synthetic construct
  source 1..21: mol_type = other DNA
ctcgcgaaagagcctggacac

SEQ ID NO: 16114 - DNA, 21 bp, synthetic construct
  misc_feature 1..21: note = Synthetic construct
  source 1..21: mol_type = other DNA
ctcgcgaaagagcccagacac

SEQ ID NO: 16115 - DNA, 21 bp, synthetic construct
  misc_feature 1..21: note = Synthetic construct
  source 1..21: mol_type = other DNA
ctcgcgaaagagccccgacac

SEQ ID NO: 16116 - DNA, 21 bp, synthetic construct
  misc_feature 1..21: note = Synthetic construct
  source 1..21: mol_type = other DNA
ctcgcgaaagagccctgacac

SEQ ID NO: 16117 - DNA, 21 bp, synthetic construct
  misc_feature 1..21: note = Synthetic construct
  source 1..21: mol_type = other DNA
ctcgcgaaagagcccgaacac

SEQ ID NO: 16118 - DNA, 21 bp, synthetic construct
  misc_feature 1..21: note = Synthetic construct
  source 1..21: mol_type = other DNA
ctcgcgaaagagcccgcacac

SEQ ID NO: 16119 - DNA, 21 bp, synthetic construct
  misc_feature 1..21: note = Synthetic construct
  source 1..21: mol_type = other DNA
ctcgcgaaagagcccgtacac

SEQ ID NO: 16120 - DNA, 21 bp, synthetic construct
  misc_feature 1..21: note = Synthetic construct
  source 1..21: mol_type = other DNA
ctcgcgaaagagcccggccac

SEQ ID NO: 16121 - DNA, 21 bp, synthetic construct
  misc_feature 1..21: note = Synthetic construct
  source 1..21: mol_type = other DNA
ctcgcgaaagagcccgggcac

SEQ ID NO: 16122 - DNA, 21 bp, synthetic construct
  misc_feature 1..21: note = Synthetic construct
  source 1..21: mol_type = other DNA
ctcgcgaaagagcccggtcac

SEQ ID NO: 16123 - DNA, 21 bp, synthetic construct
  misc_feature 1..21: note = Synthetic construct
  source 1..21: mol_type = other DNA
ctcgcgaaagagcccggaaac

SEQ ID NO: 16124 - DNA, 21 bp, synthetic construct
  misc_feature 1..21: note = Synthetic construct
  source 1..21: mol_type = other DNA
ctcgcgaaagagcccggagac

SEQ ID NO: 16125 - DNA, 21 bp, synthetic construct
  misc_feature 1..21: note = Synthetic construct
  source 1..21: mol_type = other DNA
ctcgcgaaagagcccggatac

SEQ ID NO: 16126 - DNA, 21 bp, synthetic construct
  misc_feature 1..21: note = Synthetic construct
  source 1..21: mol_type = other DNA
ctcgcgaaagagcccggaccc

SEQ ID NO: 16127 - DNA, 21 bp, synthetic construct
  misc_feature 1..21: note = Synthetic construct
  source 1..21: mol_type = other DNA
ctcgcgaaagagcccggacgc

SEQ ID NO: 16128 - DNA, 21 bp, synthetic construct
  misc_feature 1..21: note = Synthetic construct
  source 1..21: mol_type = other DNA
ctcgcgaaagagcccggactc

SEQ ID NO: 16129 - DNA, 21 bp, synthetic construct
  misc_feature 1..21: note = Synthetic construct
  source 1..21: mol_type = other DNA
ctcgcgaaagagcccggacaa

SEQ ID NO: 16130 - DNA, 21 bp, synthetic construct
  misc_feature 1..21: note = Synthetic construct
  source 1..21: mol_type = other DNA
ctcgcgaaagagcccggacag

SEQ ID NO: 16131 - DNA, 21 bp, synthetic construct
  misc_feature 1..21: note = Synthetic construct
  source 1..21: mol_type = other DNA
ctcgcgaaagagcccggacat

SEQ ID NO: 16132 - DNA, 23 bp, synthetic construct
  misc_feature 1..23: note = Synthetic construct
  source 1..23: mol_type = other DNA
acaccgttggagaacgtgcattg

SEQ ID NO: 16133 - DNA, 23 bp, synthetic construct
  misc_feature 1..23: note = Synthetic construct
  source 1..23: mol_type = other DNA
ccaccgttggagaacgtgcattg

SEQ ID NO: 16134 - DNA, 23 bp, synthetic construct
  misc_feature 1..23: note = Synthetic construct
  source 1..23: mol_type = other DNA
tcaccgttggagaacgtgcattg

SEQ ID NO: 16135 - DNA, 23 bp, synthetic construct
  misc_feature 1..23: note = Synthetic construct
  source 1..23: mol_type = other DNA
gaaccgttggagaacgtgcattg

SEQ ID NO: 16136 - DNA, 23 bp, synthetic construct
  misc_feature 1..23: note = Synthetic construct
  source 1..23: mol_type = other DNA
ggaccgttggagaacgtgcattg

SEQ ID NO: 16137 - DNA, 23 bp, synthetic construct
  misc_feature 1..23: note = Synthetic construct
  source 1..23: mol_type = other DNA
gtaccgttggagaacgtgcattg

SEQ ID NO: 16138 - DNA, 23 bp, synthetic construct
  misc_feature 1..23: note = Synthetic construct
  source 1..23: mol_type = other DNA
gccccgttggagaacgtgcattg

SEQ ID NO: 16139 - DNA, 23 bp, synthetic construct
  misc_feature 1..23: note = Synthetic construct
  source 1..23: mol_type = other DNA
gcgccgttggagaacgtgcattg

SEQ ID NO: 16140 - DNA, 23 bp, synthetic construct
  misc_feature 1..23: note = Synthetic construct
  source 1..23: mol_type = other DNA
gctccgttggagaacgtgcattg

SEQ ID NO: 16141 - DNA, 23 bp, synthetic construct
  misc_feature 1..23: note = Synthetic construct
  source 1..23: mol_type = other DNA
gcaacgttggagaacgtgcattg

SEQ ID NO: 16142 - DNA, 23 bp, synthetic construct
  misc_feature 1..23: note = Synthetic construct
  source 1..23: mol_type = other DNA
gcagcgttggagaacgtgcattg

SEQ ID NO: 16143 - DNA, 23 bp, synthetic construct
  misc_feature 1..23: note = Synthetic construct
  source 1..23: mol_type = other DNA
gcatcgttggagaacgtgcattg

SEQ ID NO: 16144 - DNA, 23 bp, synthetic construct
  misc_feature 1..23: note = Synthetic construct
  source 1..23: mol_type = other DNA
gcacagttggagaacgtgcattg

SEQ ID NO: 16145 - DNA, 23 bp, synthetic construct
  misc_feature 1..23: note = Synthetic construct
  source 1..23: mol_type = other DNA
gcacggttggagaacgtgcattg

SEQ ID NO: 16146 - DNA, 23 bp, synthetic construct
  misc_feature 1..23: note = Synthetic construct
  source 1..23: mol_type = other DNA
gcactgttggagaacgtgcattg

SEQ ID NO: 16147 - DNA, 23 bp, synthetic construct
  misc_feature 1..23: note = Synthetic construct
  source 1..23: mol_type = other DNA
gcaccattggagaacgtgcattg

SEQ ID NO: 16148 - DNA, 23 bp, synthetic construct
  misc_feature 1..23: note = Synthetic construct
  source 1..23: mol_type = other DNA
gcacccttggagaacgtgcattg

SEQ ID NO: 16149 - DNA, 23 bp, synthetic construct
  misc_feature 1..23: note = Synthetic construct
  source 1..23: mol_type = other DNA
gcacctttggagaacgtgcattg

SEQ ID NO: 16150 - DNA, 23 bp, synthetic construct
  misc_feature 1..23: note = Synthetic construct
  source 1..23: mol_type = other DNA
gcaccgatggagaacgtgcattg

SEQ ID NO: 16151 - DNA, 23 bp, synthetic construct
  misc_feature 1..23: note = Synthetic construct
  source 1..23: mol_type = other DNA
gcaccgctggagaacgtgcattg

SEQ ID NO: 16152 - DNA, 23 bp, synthetic construct
  misc_feature 1..23: note = Synthetic construct
  source 1..23: mol_type = other DNA
gcaccggtggagaacgtgcattg

SEQ ID NO: 16153 - DNA, 23 bp, synthetic construct
  misc_feature 1..23: note = Synthetic construct
  source 1..23: mol_type = other DNA
gcaccgtaggagaacgtgcattg

SEQ ID NO: 16154 - DNA, 23 bp, synthetic construct
  misc_feature 1..23: note = Synthetic construct
  source 1..23: mol_type = other DNA
gcaccgtcggagaacgtgcattg

SEQ ID NO: 16155 - DNA, 23 bp, synthetic construct
  misc_feature 1..23: note = Synthetic construct
  source 1..23: mol_type = other DNA
gcaccgtgggagaacgtgcattg

SEQ ID NO: 16156 - DNA, 23 bp, synthetic construct
  misc_feature 1..23: note = Synthetic construct
  source 1..23: mol_type = other DNA
gcaccgttagagaacgtgcattg

SEQ ID NO: 16157 - DNA, 23 bp, synthetic construct
  misc_feature 1..23: note = Synthetic construct
  source 1..23: mol_type = other DNA
gcaccgttcgagaacgtgcattg

SEQ ID NO: 16158 - DNA, 23 bp, synthetic construct
  misc_feature 1..23: note = Synthetic construct
  source 1..23: mol_type = other DNA
gcaccgtttgagaacgtgcattg

SEQ ID NO: 16159 - DNA, 23 bp, synthetic construct
  misc_feature 1..23: note = Synthetic construct
  source 1..23: mol_type = other DNA
gcaccgttgaagaacgtgcattg

SEQ ID NO: 16160 - DNA, 23 bp, synthetic construct
  misc_feature 1..23: note = Synthetic construct
  source 1..23: mol_type = other DNA
gcaccgttgcagaacgtgcattg

SEQ ID NO: 16161 - DNA, 23 bp, synthetic construct
  misc_feature 1..23: note = Synthetic construct
  source 1..23: mol_type = other DNA
gcaccgttgtagaacgtgcattg

SEQ ID NO: 16162 - DNA, 23 bp, synthetic construct
  misc_feature 1..23: note = Synthetic construct
  source 1..23: mol_type = other DNA
gcaccgttggcgaacgtgcattg

SEQ ID NO: 16163 - DNA, 23 bp, synthetic construct
  misc_feature 1..23: note = Synthetic construct
  source 1..23: mol_type = other DNA
gcaccgttggggaacgtgcattg

SEQ ID NO: 16164 - DNA, 23 bp, synthetic construct
  misc_feature 1..23: note = Synthetic construct
  source 1..23: mol_type = other DNA
gcaccgttggtgaacgtgcattg

SEQ ID NO: 16165 - DNA, 23 bp, synthetic construct
  misc_feature 1..23: note = Synthetic construct
  source 1..23: mol_type = other DNA
gcaccgttggaaaacgtgcattg

SEQ ID NO: 16166 - DNA, 23 bp, synthetic construct
  misc_feature 1..23: note = Synthetic construct
  source 1..23: mol_type = other DNA
gcaccgttggacaacgtgcattg

SEQ ID NO: 16167 - DNA, 23 bp, synthetic construct
  misc_feature 1..23: note = Synthetic construct
  source 1..23: mol_type = other DNA
gcaccgttggataacgtgcattg

SEQ ID NO: 16168 - DNA, 23 bp, synthetic construct
  misc_feature 1..23: note = Synthetic construct
  source 1..23: mol_type = other DNA
gcaccgttggagcacgtgcattg

SEQ ID NO: 16169 - DNA, 23 bp, synthetic construct
  misc_feature 1..23: note = Synthetic construct
  source 1..23: mol_type = other DNA
gcaccgttggaggacgtgcattg

SEQ ID NO: 16170 - DNA, 23 bp, synthetic construct
  misc_feature 1..23: note = Synthetic construct
  source 1..23: mol_type = other DNA
gcaccgttggagtacgtgcattg

SEQ ID NO: 16171 - DNA, 23 bp, synthetic construct
  misc_feature 1..23: note = Synthetic construct
  source 1..23: mol_type = other DNA
gcaccgttggagaccgtgcattg

SEQ ID NO: 16172 - DNA, 23 bp, synthetic construct
  misc_feature 1..23: note = Synthetic construct
  source 1..23: mol_type = other DNA
gcaccgttggagagcgtgcattg

SEQ ID NO: 16173 - DNA, 23 bp, synthetic construct
  misc_feature 1..23: note = Synthetic construct
  source 1..23: mol_type = other DNA
gcaccgttggagatcgtgcattg

SEQ ID NO: 16174 - DNA, 23 bp, synthetic construct
  misc_feature 1..23: note = Synthetic construct
  source 1..23: mol_type = other DNA
gcaccgttggagaaagtgcattg

SEQ ID NO: 16175 - DNA, 23 bp, synthetic construct
  misc_feature 1..23: note = Synthetic construct
  source 1..23: mol_type = other DNA
gcaccgttggagaaggtgcattg

SEQ ID NO: 16176 - DNA, 23 bp, synthetic construct
  misc_feature 1..23: note = Synthetic construct
  source 1..23: mol_type = other DNA
gcaccgttggagaatgtgcattg

SEQ ID NO: 16177 - DNA, 23 bp, synthetic construct
  misc_feature 1..23: note = Synthetic construct
  source 1..23: mol_type = other DNA
gcaccgttggagaacatgcattg

SEQ ID NO: 16178 - DNA, 23 bp, synthetic construct
  misc_feature 1..23: note = Synthetic construct
  source 1..23: mol_type = other DNA
gcaccgttggagaacctgcattg

SEQ ID NO: 16179 - DNA, 23 bp, synthetic construct
  misc_feature 1..23: note = Synthetic construct
  source 1..23: mol_type = other DNA
gcaccgttggagaacttgcattg

SEQ ID NO: 16180 - DNA, 23 bp, synthetic construct
  misc_feature 1..23: note = Synthetic construct
  source 1..23: mol_type = other DNA
gcaccgttggagaacgagcattg

SEQ ID NO: 16181 - DNA, 23 bp, synthetic construct
  misc_feature 1..23: note = Synthetic construct
  source 1..23: mol_type = other DNA
gcaccgttggagaacgcgcattg

SEQ ID NO: 16182 - DNA, 23 bp, synthetic construct
  misc_feature 1..23: note = Synthetic construct
  source 1..23: mol_type = other DNA
gcaccgttggagaacgggcattg

SEQ ID NO: 16183 - DNA, 23 bp, synthetic construct
  misc_feature 1..23: note = Synthetic construct
  source 1..23: mol_type = other DNA
gcaccgttggagaacgtacattg

SEQ ID NO: 16184 - DNA, 23 bp, synthetic construct
  misc_feature 1..23: note = Synthetic construct
  source 1..23: mol_type = other DNA
gcaccgttggagaacgtccattg

SEQ ID NO: 16185 - DNA, 23 bp, synthetic construct
  misc_feature 1..23: note = Synthetic construct
  source 1..23: mol_type = other DNA
gcaccgttggagaacgttcattg

SEQ ID NO: 16186 - DNA, 23 bp, synthetic construct
  misc_feature 1..23: note = Synthetic construct
  source 1..23: mol_type = other DNA
gcaccgttggagaacgtgaattg

SEQ ID NO: 16187 - DNA, 23 bp, synthetic construct
  misc_feature 1..23: note = Synthetic construct
  source 1..23: mol_type = other DNA
gcaccgttggagaacgtggattg

SEQ ID NO: 16188 - DNA, 23 bp, synthetic construct
  misc_feature 1..23: note = Synthetic construct
  source 1..23: mol_type = other DNA
gcaccgttggagaacgtgtattg

SEQ ID NO: 16189 - DNA, 23 bp, synthetic construct
  misc_feature 1..23: note = Synthetic construct
  source 1..23: mol_type = other DNA
gcaccgttggagaacgtgccttg

SEQ ID NO: 16190 - DNA, 23 bp, synthetic construct
  misc_feature 1..23: note = Synthetic construct
  source 1..23: mol_type = other DNA
gcaccgttggagaacgtgcgttg

SEQ ID NO: 16191 - DNA, 23 bp, synthetic construct
  misc_feature 1..23: note = Synthetic construct
  source 1..23: mol_type = other DNA
gcaccgttggagaacgtgctttg

SEQ ID NO: 16192 - DNA, 23 bp, synthetic construct
  misc_feature 1..23: note = Synthetic construct
  source 1..23: mol_type = other DNA
gcaccgttggagaacgtgcaatg

SEQ ID NO: 16193 - DNA, 23 bp, synthetic construct
  misc_feature 1..23: note = Synthetic construct
  source 1..23: mol_type = other DNA
gcaccgttggagaacgtgcactg

SEQ ID NO: 16194 - DNA, 23 bp, synthetic construct
  misc_feature 1..23: note = Synthetic construct
  source 1..23: mol_type = other DNA
gcaccgttggagaacgtgcagtg

SEQ ID NO: 16195 - DNA, 23 bp, synthetic construct
  misc_feature 1..23: note = Synthetic construct
  source 1..23: mol_type = other DNA
gcaccgttggagaacgtgcatag

SEQ ID NO: 16196 - DNA, 23 bp, synthetic construct
  misc_feature 1..23: note = Synthetic construct
  source 1..23: mol_type = other DNA
gcaccgttggagaacgtgcatcg

SEQ ID NO: 16197 - DNA, 23 bp, synthetic construct
  misc_feature 1..23: note = Synthetic construct
  source 1..23: mol_type = other DNA
gcaccgttggagaacgtgcatgg

SEQ ID NO: 16198 - DNA, 23 bp, synthetic construct
  misc_feature 1..23: note = Synthetic construct
  source 1..23: mol_type = other DNA
gcaccgttggagaacgtgcatta

SEQ ID NO: 16199 - DNA, 23 bp, synthetic construct
  misc_feature 1..23: note = Synthetic construct
  source 1..23: mol_type = other DNA
gcaccgttggagaacgtgcattc

SEQ ID NO: 16200 - DNA, 23 bp, synthetic construct
  misc_feature 1..23: note = Synthetic construct
  source 1..23: mol_type = other DNA
gcaccgttggagaacgtgcattt

SEQ ID NO: 16201 - DNA, 22 bp, synthetic construct
  misc_feature 1..22: note = Synthetic construct
  source 1..22: mol_type = other DNA
agcgattgctgagggaatcggg

SEQ ID NO: 16202 - DNA, 22 bp, synthetic construct
  misc_feature 1..22: note = Synthetic construct
  source 1..22: mol_type = other DNA
cgcgattgctgagggaatcggg

SEQ ID NO: 16203 - DNA, 22 bp, synthetic construct
  misc_feature 1..22: note = Synthetic construct
  source 1..22: mol_type = other DNA
ggcgattgctgagggaatcggg

SEQ ID NO: 16204 - DNA, 22 bp, synthetic construct
  misc_feature 1..22: note = Synthetic construct
  source 1..22: mol_type = other DNA
tacgattgctgagggaatcggg

SEQ ID NO: 16205 - DNA, 22 bp, synthetic construct
  misc_feature 1..22: note = Synthetic construct
  source 1..22: mol_type = other DNA
tccgattgctgagggaatcggg

SEQ ID NO: 16206 - DNA, 22 bp, synthetic construct
  misc_feature 1..22: note = Synthetic construct
  source 1..22: mol_type = other DNA
ttcgattgctgagggaatcggg

SEQ ID NO: 16207 - DNA, 22 bp, synthetic construct
  misc_feature 1..22: note = Synthetic construct
  source 1..22: mol_type = other DNA
tgagattgctgagggaatcggg

SEQ ID NO: 16208 - DNA, 22 bp, synthetic construct
  misc_feature 1..22: note = Synthetic construct
  source 1..22: mol_type = other DNA
tgggattgctgagggaatcggg

SEQ ID NO: 16209 - DNA, 22 bp, synthetic construct
  misc_feature 1..22: note = Synthetic construct
  source 1..22: mol_type = other DNA
tgtgattgctgagggaatcggg

SEQ ID NO: 16210 - DNA, 22 bp, synthetic construct
  misc_feature 1..22: note = Synthetic construct
  source 1..22: mol_type = other DNA
tgcaattgctgagggaatcggg

SEQ ID NO: 16211 - DNA, 22 bp, synthetic construct
  misc_feature 1..22: note = Synthetic construct
  source 1..22: mol_type = other DNA
tgccattgctgagggaatcggg

SEQ ID NO: 16212 - DNA, 22 bp, synthetic construct
  misc_feature 1..22: note = Synthetic construct
  source 1..22: mol_type = other DNA
tgctattgctgagggaatcggg

SEQ ID NO: 16213 - DNA, 22 bp, synthetic construct
  misc_feature 1..22: note = Synthetic construct
  source 1..22: mol_type = other DNA
tgcgcttgctgagggaatcggg

SEQ ID NO: 16214 - DNA, 22 bp, synthetic construct
  misc_feature 1..22: note = Synthetic construct
  source 1..22: mol_type = other DNA
tgcggttgctgagggaatcggg

SEQ ID NO: 16215 - DNA, 22 bp, synthetic construct
  misc_feature 1..22: note = Synthetic construct
  source 1..22: mol_type = other DNA
tgcgtttgctgagggaatcggg

SEQ ID NO: 16216 - DNA, 22 bp, synthetic construct
  misc_feature 1..22: note = Synthetic construct
  source 1..22: mol_type = other DNA
tgcgaatgctgagggaatcggg

SEQ ID NO: 16217 - DNA, 22 bp, synthetic construct
  misc_feature 1..22: note = Synthetic construct
  source 1..22: mol_type = other DNA
tgcgactgctgagggaatcggg

SEQ ID NO: 16218 - DNA, 22 bp, synthetic construct
  misc_feature 1..22: note = Synthetic construct
  source 1..22: mol_type = other DNA
tgcgagtgctgagggaatcggg

SEQ ID NO: 16219 - DNA, 22 bp, synthetic construct
  misc_feature 1..22: note = Synthetic construct
  source 1..22: mol_type = other DNA
tgcgatagctgagggaatcggg

SEQ ID NO: 16220 - DNA, 22 bp, synthetic construct
  misc_feature 1..22: note = Synthetic construct
  source 1..22: mol_type = other DNA
tgcgatcgctgagggaatcggg

SEQ ID NO: 16221 - DNA, 22 bp, synthetic construct
  misc_feature 1..22: note = Synthetic construct
  source 1..22: mol_type = other DNA
tgcgatggctgagggaatcggg

SEQ ID NO: 16222 - DNA, 22 bp, synthetic construct
  misc_feature 1..22: note = Synthetic construct
  source 1..22: mol_type = other DNA
tgcgattactgagggaatcggg

SEQ ID NO: 16223 - DNA, 22 bp, synthetic construct
  misc_feature 1..22: note = Synthetic construct
  source 1..22: mol_type = other DNA
tgcgattcctgagggaatcggg

SEQ ID NO: 16224 - DNA, 22 bp, synthetic construct
  misc_feature 1..22: note = Synthetic construct
  source 1..22: mol_type = other DNA
tgcgatttctgagggaatcggg

SEQ ID NO: 16225 - DNA, 22 bp, synthetic construct
  misc_feature 1..22: note = Synthetic construct
  source 1..22: mol_type = other DNA
tgcgattgatgagggaatcggg

SEQ ID NO: 16226 - DNA, 22 bp, synthetic construct
  misc_feature 1..22: note = Synthetic construct
  source 1..22: mol_type = other DNA
tgcgattggtgagggaatcggg

SEQ ID NO: 16227 - DNA, 22 bp, synthetic construct
  misc_feature 1..22: note = Synthetic construct
  source 1..22: mol_type = other DNA
tgcgattgttgagggaatcggg

SEQ ID NO: 16228 - DNA, 22 bp, synthetic construct
  misc_feature 1..22: note = Synthetic construct
  source 1..22: mol_type = other DNA
tgcgattgcagagggaatcggg

SEQ ID NO: 16229 - DNA, 22 bp, synthetic construct
  misc_feature 1..22: note = Synthetic construct
  source 1..22: mol_type = other DNA
tgcgattgccgagggaatcggg

SEQ ID NO: 16230 - DNA, 22 bp, synthetic construct
  misc_feature 1..22: note = Synthetic construct
  source 1..22: mol_type = other DNA
tgcgattgcggagggaatcggg

SEQ ID NO: 16231 - DNA, 22 bp, synthetic construct
  misc_feature 1..22: note = Synthetic construct
  source 1..22: mol_type = other DNA
tgcgattgctaagggaatcggg

SEQ ID NO: 16232 - DNA, 22 bp, synthetic construct
  misc_feature 1..22: note = Synthetic construct
  source 1..22: mol_type = other DNA
tgcgattgctcagggaatcggg

SEQ ID NO: 16233 - DNA, 22 bp, synthetic construct
  misc_feature 1..22: note = Synthetic construct
  source 1..22: mol_type = other DNA
tgcgattgcttagggaatcggg

SEQ ID NO: 16234 - DNA, 22 bp, synthetic construct
  misc_feature 1..22: note = Synthetic construct
  source 1..22: mol_type = other DNA
tgcgattgctgcgggaatcggg

SEQ ID NO: 16235 - DNA, 22 bp, synthetic construct
  misc_feature 1..22: note = Synthetic construct
  source 1..22: mol_type = other DNA
tgcgattgctgggggaatcggg

SEQ ID NO: 16236 - DNA, 22 bp, synthetic construct
  misc_feature 1..22: note = Synthetic construct
  source 1..22: mol_type = other DNA
tgcgattgctgtgggaatcggg

SEQ ID NO: 16237 - DNA, 22 bp, synthetic construct
  misc_feature 1..22: note = Synthetic construct
  source 1..22: mol_type = other DNA
tgcgattgctgaaggaatcggg

SEQ ID NO: 16238 - DNA, 22 bp, synthetic construct
  misc_feature 1..22: note = Synthetic construct
  source 1..22: mol_type = other DNA
tgcgattgctgacggaatcggg

SEQ ID NO: 16239 - DNA, 22 bp, synthetic construct
  misc_feature 1..22: note = Synthetic construct
  source 1..22: mol_type = other DNA
tgcgattgctgatggaatcggg

SEQ ID NO: 16240 - DNA, 22 bp, synthetic construct
  misc_feature 1..22: note = Synthetic construct
  source 1..22: mol_type = other DNA
tgcgattgctgagagaatcggg

SEQ ID NO: 16241 - DNA, 22 bp, synthetic construct
  misc_feature 1..22: note = Synthetic construct
  source 1..22: mol_type = other DNA
tgcgattgctgagcgaatcggg

SEQ ID NO: 16242 - DNA, 22 bp, synthetic construct
  misc_feature 1..22: note = Synthetic construct
  source 1..22: mol_type = other DNA
tgcgattgctgagtgaatcggg

SEQ ID NO: 16243 - DNA, 22 bp, synthetic construct
  misc_feature 1..22: note = Synthetic construct
  source 1..22: mol_type = other DNA
tgcgattgctgaggaaatcggg

SEQ ID NO: 16244 - DNA, 22 bp, synthetic construct
  misc_feature 1..22: note = Synthetic construct
  source 1..22: mol_type = other DNA
tgcgattgctgaggcaatcggg

SEQ ID NO: 16245 - DNA, 22 bp, synthetic construct
  misc_feature 1..22: note = Synthetic construct
  source 1..22: mol_type = other DNA
tgcgattgctgaggtaatcggg

SEQ ID NO: 16246 - DNA, 22 bp, synthetic construct
  misc_feature 1..22: note = Synthetic construct
  source 1..22: mol_type = other DNA
tgcgattgctgagggcatcggg

SEQ ID NO: 16247 - DNA, 22 bp, synthetic construct
  misc_feature 1..22: note = Synthetic construct
  source 1..22: mol_type = other DNA
tgcgattgctgaggggatcggg

SEQ ID NO: 16248 - DNA, 22 bp, synthetic construct
  misc_feature 1..22: note = Synthetic construct
  source 1..22: mol_type = other DNA
tgcgattgctgagggtatcggg

SEQ ID NO: 16249 - DNA, 22 bp, synthetic construct
  misc_feature 1..22: note = Synthetic construct
  source 1..22: mol_type = other DNA
tgcgattgctgagggactcggg

SEQ ID NO: 16250 - DNA, 22 bp, synthetic construct
  misc_feature 1..22: note = Synthetic construct
  source 1..22: mol_type = other DNA
tgcgattgctgagggagtcggg

SEQ ID NO: 16251 - DNA, 22 bp, synthetic construct
  misc_feature 1..22: note = Synthetic construct
  source 1..22: mol_type = other DNA
tgcgattgctgagggattcggg

SEQ ID NO: 16252 - DNA, 22 bp, synthetic construct
  misc_feature 1..22: note = Synthetic construct
  source 1..22: mol_type = other DNA
tgcgattgctgagggaaacggg

SEQ ID NO: 16253 - DNA, 22 bp, synthetic construct
  misc_feature 1..22: note = Synthetic construct
  source 1..22: mol_type = other DNA
tgcgattgctgagggaaccggg

SEQ ID NO: 16254 - DNA, 22 bp, synthetic construct
  misc_feature 1..22: note = Synthetic construct
  source 1..22: mol_type = other DNA
tgcgattgctgagggaagcggg

SEQ ID NO: 16255 - DNA, 22 bp, synthetic construct
  misc_feature 1..22: note = Synthetic construct
  source 1..22: mol_type = other DNA
tgcgattgctgagggaataggg

SEQ ID NO: 16256 - DNA, 22 bp, synthetic construct
  misc_feature 1..22: note = Synthetic construct
  source 1..22: mol_type = other DNA
tgcgattgctgagggaatgggg

SEQ ID NO: 16257 - DNA, 22 bp, synthetic construct
  misc_feature 1..22: note = Synthetic construct
  source 1..22: mol_type = other DNA
tgcgattgctgagggaattggg

SEQ ID NO: 16258 - DNA, 22 bp, synthetic construct
  misc_feature 1..22: note = Synthetic construct
  source 1..22: mol_type = other DNA
tgcgattgctgagggaatcagg

SEQ ID NO: 16259 - DNA, 22 bp, synthetic construct
  misc_feature 1..22: note = Synthetic construct
  source 1..22: mol_type = other DNA
tgcgattgctgagggaatccgg

SEQ ID NO: 16260 - DNA, 22 bp, synthetic construct
  misc_feature 1..22: note = Synthetic construct
  source 1..22: mol_type = other DNA
tgcgattgctgagggaatctgg

SEQ ID NO: 16261 - DNA, 22 bp, synthetic construct
  misc_feature 1..22: note = Synthetic construct
  source 1..22: mol_type = other DNA
tgcgattgctgagggaatcgag

SEQ ID NO: 16262 - DNA, 22 bp, synthetic construct
  misc_feature 1..22: note = Synthetic construct
  source 1..22: mol_type = other DNA
tgcgattgctgagggaatcgcg

SEQ ID NO: 16263 - DNA, 22 bp, synthetic construct
  misc_feature 1..22: note = Synthetic construct
  source 1..22: mol_type = other DNA
tgcgattgctgagggaatcgtg

SEQ ID NO: 16264 - DNA, 22 bp, synthetic construct
  misc_feature 1..22: note = Synthetic construct
  source 1..22: mol_type = other DNA
tgcgattgctgagggaatcgga

SEQ ID NO: 16265 - DNA, 22 bp, synthetic construct
  misc_feature 1..22: note = Synthetic construct
  source 1..22: mol_type = other DNA
tgcgattgctgagggaatcggc

SEQ ID NO: 16266 - DNA, 22 bp, synthetic construct
  misc_feature 1..22: note = Synthetic construct
  source 1..22: mol_type = other DNA
tgcgattgctgagggaatcggt

SEQ ID NO: 16267 - DNA, 22 bp, synthetic construct
  misc_feature 1..22: note = Synthetic construct
  source 1..22: mol_type = other DNA
ctgaaagcaccgacccctttct

SEQ ID NO: 16268 - DNA, 22 bp, synthetic construct
  misc_feature 1..22: note = Synthetic construct
  source 1..22: mol_type = other DNA
gtgaaagcaccgacccctttct

SEQ ID NO: 16269 - DNA, 22 bp, synthetic construct
  misc_feature 1..22: note = Synthetic construct
  source 1..22: mol_type = other DNA
ttgaaagcaccgacccctttct

SEQ ID NO: 16270 - DNA, 22 bp, synthetic construct
  misc_feature 1..22: note = Synthetic construct
  source 1..22: mol_type = other DNA
aagaaagcaccgacccctttct

SEQ ID NO: 16271 - DNA, 22 bp, synthetic construct
  misc_feature 1..22: note = Synthetic construct
  source 1..22: mol_type = other DNA
acgaaagcaccgacccctttct

SEQ ID NO: 16272 - DNA, 22 bp, synthetic construct
  misc_feature 1..22: note = Synthetic construct
  source 1..22: mol_type = other DNA
aggaaagcaccgacccctttct

SEQ ID NO: 16273 - DNA, 22 bp, synthetic construct
  misc_feature 1..22: note = Synthetic construct
  source 1..22: mol_type = other DNA
ataaaagcaccgacccctttct

SEQ ID NO: 16274 - DNA, 22 bp, synthetic construct
  misc_feature 1..22: note = Synthetic construct
  source 1..22: mol_type = other DNA
atcaaagcaccgacccctttct

SEQ ID NO: 16275 - DNA, 22 bp, synthetic construct
  misc_feature 1..22: note = Synthetic construct
  source 1..22: mol_type = other DNA
attaaagcaccgacccctttct

SEQ ID NO: 16276 - DNA, 22 bp, synthetic construct
  misc_feature 1..22: note = Synthetic construct
  source 1..22: mol_type = other DNA
atgcaagcaccgacccctttct

SEQ ID NO: 16277 - DNA, 22 bp, synthetic construct
  misc_feature 1..22: note = Synthetic construct
  source 1..22: mol_type = other DNA
atggaagcaccgacccctttct

SEQ ID NO: 16278 - DNA, 22 bp, synthetic construct
  misc_feature 1..22: note = Synthetic construct
  source 1..22: mol_type = other DNA
atgtaagcaccgacccctttct

SEQ ID NO: 16279 - DNA, 22 bp, synthetic construct
  misc_feature 1..22: note = Synthetic construct
  source 1..22: mol_type = other DNA
atgacagcaccgacccctttct

SEQ ID NO: 16280 - DNA, 22 bp, synthetic construct
  misc_feature 1..22: note = Synthetic construct
  source 1..22: mol_type = other DNA
atgagagcaccgacccctttct

SEQ ID NO: 16281 - DNA, 22 bp, synthetic construct
  misc_feature 1..22: note = Synthetic construct
  source 1..22: mol_type = other DNA
atgatagcaccgacccctttct

SEQ ID NO: 16282 - DNA, 22 bp, synthetic construct
  misc_feature 1..22: note = Synthetic construct
  source 1..22: mol_type = other DNA
atgaacgcaccgacccctttct

SEQ ID NO: 16283 - DNA, 22 bp, synthetic construct
  misc_feature 1..22: note = Synthetic construct
  source 1..22: mol_type = other DNA
atgaaggcaccgacccctttct

SEQ ID NO: 16284 - DNA, 22 bp, synthetic construct
  misc_feature 1..22: note = Synthetic construct
  source 1..22: mol_type = other DNA
atgaatgcaccgacccctttct

SEQ ID NO: 16285 - DNA, 22 bp, synthetic construct
  misc_feature 1..22: note = Synthetic construct
  source 1..22: mol_type = other DNA
atgaaaacaccgacccctttct

SEQ ID NO: 16286 - DNA, 22 bp, synthetic construct
  misc_feature 1..22: note = Synthetic construct
  source 1..22: mol_type = other DNA
atgaaaccaccgacccctttct

SEQ ID NO: 16287 - DNA, 22 bp, synthetic construct
  misc_feature 1..22: note = Synthetic construct
  source 1..22: mol_type = other DNA
atgaaatcaccgacccctttct

SEQ ID NO: 16288 - DNA, 22 bp, synthetic construct
  misc_feature 1..22: note = Synthetic construct
  source 1..22: mol_type = other DNA
atgaaagaaccgacccctttct

SEQ ID NO: 16289 - DNA, 22 bp, synthetic construct
  misc_feature 1..22: note = Synthetic construct
  source 1..22: mol_type = other DNA
atgaaaggaccgacccctttct

SEQ ID NO: 16290 - DNA, 22 bp, synthetic construct
  misc_feature 1..22: note = Synthetic construct
  source 1..22: mol_type = other DNA
atgaaagtaccgacccctttct

SEQ ID NO: 16291 - DNA, 22 bp, synthetic construct
  misc_feature 1..22: note = Synthetic construct
  source 1..22: mol_type = other DNA
atgaaagccccgacccctttct

SEQ ID NO: 16292 - DNA, 22 bp, synthetic construct
  misc_feature 1..22: note = Synthetic construct
  source 1..22: mol_type = other DNA
atgaaagcgccgacccctttct

SEQ ID NO: 16293 - DNA, 22 bp, synthetic construct
  misc_feature 1..22: note = Synthetic construct
  source 1..22: mol_type = other DNA
atgaaagctccgacccctttct

SEQ ID NO: 16294 - DNA, 22 bp, synthetic construct
  misc_feature 1..22: note = Synthetic construct
  source 1..22: mol_type = other DNA
atgaaagcaacgacccctttct

SEQ ID NO: 16295 - DNA, 22 bp, synthetic construct
  misc_feature 1..22: note = Synthetic construct
  source 1..22: mol_type = other DNA
atgaaagcagcgacccctttct

SEQ ID NO: 16296 - DNA, 22 bp, synthetic construct
  misc_feature 1..22: note = Synthetic construct
  source 1..22: mol_type = other DNA
atgaaagcatcgacccctttct

SEQ ID NO: 16297 - DNA, 22 bp, synthetic construct
  misc_feature 1..22: note = Synthetic construct
  source 1..22: mol_type = other DNA
atgaaagcacagacccctttct

SEQ ID NO: 16298 - DNA, 22 bp, synthetic construct
  misc_feature 1..22: note = Synthetic construct
  source 1..22: mol_type = other DNA
atgaaagcacggacccctttct

SEQ ID NO: 16299 - DNA, 22 bp, synthetic construct
  misc_feature 1..22: note = Synthetic construct
  source 1..22: mol_type = other DNA
atgaaagcactgacccctttct

SEQ ID NO: 16300 - DNA, 22 bp, synthetic construct
  misc_feature 1..22: note = Synthetic construct
  source 1..22: mol_type = other DNA
atgaaagcaccaacccctttct

SEQ ID NO: 16301 - DNA, 22 bp, synthetic construct
  misc_feature 1..22: note = Synthetic construct
  source 1..22: mol_type = other DNA
atgaaagcacccacccctttct

SEQ ID NO: 16302 - DNA, 22 bp, synthetic construct
  misc_feature 1..22: note = Synthetic construct
  source 1..22: mol_type = other DNA
atgaaagcacctacccctttct

SEQ ID NO: 16303 - DNA, 22 bp, synthetic construct
  misc_feature 1..22: note = Synthetic construct
  source 1..22: mol_type = other DNA
atgaaagcaccgccccctttct

SEQ ID NO: 16304 - DNA, 22 bp, synthetic construct
  misc_feature 1..22: note = Synthetic construct
  source 1..22: mol_type = other DNA
atgaaagcaccggcccctttct

SEQ ID NO: 16305 - DNA, 22 bp, synthetic construct
  misc_feature 1..22: note = Synthetic construct
  source 1..22: mol_type = other DNA
atgaaagcaccgtcccctttct

SEQ ID NO: 16306 - DNA, 22 bp, synthetic construct
  misc_feature 1..22: note = Synthetic construct
  source 1..22: mol_type = other DNA
atgaaagcaccgaaccctttct

SEQ ID NO: 16307 - DNA, 22 bp, synthetic construct
  misc_feature 1..22: note = Synthetic construct
  source 1..22: mol_type = other DNA
atgaaagcaccgagccctttct

SEQ ID NO: 16308 - DNA, 22 bp, synthetic construct
  misc_feature 1..22: note = Synthetic construct
  source 1..22: mol_type = other DNA
atgaaagcaccgatccctttct

SEQ ID NO: 16309 - DNA, 22 bp, synthetic construct
  misc_feature 1..22: note = Synthetic construct
  source 1..22: mol_type = other DNA
atgaaagcaccgacacctttct

SEQ ID NO: 16310 - DNA, 22 bp, synthetic construct
  misc_feature 1..22: note = Synthetic construct
  source 1..22: mol_type = other DNA
atgaaagcaccgacgcctttct

SEQ ID NO: 16311 - DNA, 22 bp, synthetic construct
  misc_feature 1..22: note = Synthetic construct
  source 1..22: mol_type = other DNA
atgaaagcaccgactcctttct

SEQ ID NO: 16312 - DNA, 22 bp, synthetic construct
  misc_feature 1..22: note = Synthetic construct
  source 1..22: mol_type = other DNA
atgaaagcaccgaccactttct

SEQ ID NO: 16313 - DNA, 22 bp, synthetic construct
  misc_feature 1..22: note = Synthetic construct
  source 1..22: mol_type = other DNA
atgaaagcaccgaccgctttct

SEQ ID NO: 16314 - DNA, 22 bp, synthetic construct
  misc_feature 1..22: note = Synthetic construct
  source 1..22: mol_type = other DNA
atgaaagcaccgacctctttct

SEQ ID NO: 16315 - DNA, 22 bp, synthetic construct
  misc_feature 1..22: note = Synthetic construct
  source 1..22: mol_type = other DNA
atgaaagcaccgacccatttct

SEQ ID NO: 16316 - DNA, 22 bp, synthetic construct
  misc_feature 1..22: note = Synthetic construct
  source 1..22: mol_type = other DNA
atgaaagcaccgacccgtttct

SEQ ID NO: 16317 - DNA, 22 bp, synthetic construct
  misc_feature 1..22: note = Synthetic construct
  source 1..22: mol_type = other DNA
atgaaagcaccgacccttttct

SEQ ID NO: 16318 - DNA, 22 bp, synthetic construct
  misc_feature 1..22: note = Synthetic construct
  source 1..22: mol_type = other DNA
atgaaagcaccgaccccattct

SEQ ID NO: 16319 - DNA, 22 bp, synthetic construct
  misc_feature 1..22: note = Synthetic construct
  source 1..22: mol_type = other DNA
atgaaagcaccgacccccttct

SEQ ID NO: 16320 - DNA, 22 bp, synthetic construct
  misc_feature 1..22: note = Synthetic construct
  source 1..22: mol_type = other DNA
atgaaagcaccgaccccgttct

SEQ ID NO: 16321 - DNA, 22 bp, synthetic construct
  misc_feature 1..22: note = Synthetic construct
  source 1..22: mol_type = other DNA
atgaaagcaccgacccctatct

SEQ ID NO: 16322 - DNA, 22 bp, synthetic construct
  misc_feature 1..22: note = Synthetic construct
  source 1..22: mol_type = other DNA
atgaaagcaccgacccctctct

SEQ ID NO: 16323 - DNA, 22 bp, synthetic construct
  misc_feature 1..22: note = Synthetic construct
  source 1..22: mol_type = other DNA
atgaaagcaccgacccctgtct

SEQ ID NO: 16324 - DNA, 22 bp, synthetic construct
  misc_feature 1..22: note = Synthetic construct
  source 1..22: mol_type = other DNA
atgaaagcaccgaccccttact

SEQ ID NO: 16325 - DNA, 22 bp, synthetic construct
  misc_feature 1..22: note = Synthetic construct
  source 1..22: mol_type = other DNA
atgaaagcaccgaccccttcct

SEQ ID NO: 16326 - DNA, 22 bp, synthetic construct
  misc_feature 1..22: note = Synthetic construct
  source 1..22: mol_type = other DNA
atgaaagcaccgaccccttgct

SEQ ID NO: 16327 - DNA, 22 bp, synthetic construct
  misc_feature 1..22: note = Synthetic construct
  source 1..22: mol_type = other DNA
atgaaagcaccgacccctttat

SEQ ID NO: 16328 - DNA, 22 bp, synthetic construct
  misc_feature 1..22: note = Synthetic construct
  source 1..22: mol_type = other DNA
atgaaagcaccgacccctttgt

SEQ ID NO: 16329 - DNA, 22 bp, synthetic construct
  misc_feature 1..22: note = Synthetic construct
  source 1..22: mol_type = other DNA
atgaaagcaccgaccccttttt

SEQ ID NO: 16330 - DNA, 22 bp, synthetic construct
  misc_feature 1..22: note = Synthetic construct
  source 1..22: mol_type = other DNA
atgaaagcaccgacccctttca

SEQ ID NO: 16331 - DNA, 22 bp, synthetic construct
  misc_feature 1..22: note = Synthetic construct
  source 1..22: mol_type = other DNA
atgaaagcaccgacccctttcc

SEQ ID NO: 16332 - DNA, 22 bp, synthetic construct
  misc_feature 1..22: note = Synthetic construct
  source 1..22: mol_type = other DNA
atgaaagcaccgacccctttcg

SEQ ID NO: 16333 - DNA, 23 bp, synthetic construct
  misc_feature 1..23: note = Synthetic construct
  source 1..23: mol_type = other DNA
acatctaaggtatggaccatcga

SEQ ID NO: 16334 - DNA, 23 bp, synthetic construct
  misc_feature 1..23: note = Synthetic construct
  source 1..23: mol_type = other DNA
ccatctaaggtatggaccatcga

SEQ ID NO: 16335 - DNA, 23 bp, synthetic construct
  misc_feature 1..23: note = Synthetic construct
  source 1..23: mol_type = other DNA
tcatctaaggtatggaccatcga

SEQ ID NO: 16336 - DNA, 23 bp, synthetic construct
  misc_feature 1..23: note = Synthetic construct
  source 1..23: mol_type = other DNA
gaatctaaggtatggaccatcga

SEQ ID NO: 16337 - DNA, 23 bp, synthetic construct
  misc_feature 1..23: note = Synthetic construct
  source 1..23: mol_type = other DNA
ggatctaaggtatggaccatcga

SEQ ID NO: 16338 - DNA, 23 bp, synthetic construct
  misc_feature 1..23: note = Synthetic construct
  source 1..23: mol_type = other DNA
gtatctaaggtatggaccatcga

SEQ ID NO: 16339 - DNA, 23 bp, synthetic construct
  misc_feature 1..23: note = Synthetic construct
  source 1..23: mol_type = other DNA
gcctctaaggtatggaccatcga

SEQ ID NO: 16340 - DNA, 23 bp, synthetic construct
  misc_feature 1..23: note = Synthetic construct
  source 1..23: mol_type = other DNA
gcgtctaaggtatggaccatcga

SEQ ID NO: 16341 - DNA, 23 bp, synthetic construct
  misc_feature 1..23: note = Synthetic construct
  source 1..23: mol_type = other DNA
gcttctaaggtatggaccatcga

SEQ ID NO: 16342 - DNA, 23 bp, synthetic construct
  misc_feature 1..23: note = Synthetic construct
  source 1..23: mol_type = other DNA
gcaactaaggtatggaccatcga

SEQ ID NO: 16343 - DNA, 23 bp, synthetic construct
  misc_feature 1..23: note = Synthetic construct
  source 1..23: mol_type = other DNA
gcacctaaggtatggaccatcga

SEQ ID NO: 16344 - DNA, 23 bp, synthetic construct
  misc_feature 1..23: note = Synthetic construct
  source 1..23: mol_type = other DNA
gcagctaaggtatggaccatcga

SEQ ID NO: 16345 - DNA, 23 bp, synthetic construct
  misc_feature 1..23: note = Synthetic construct
  source 1..23: mol_type = other DNA
gcatataaggtatggaccatcga

SEQ ID NO: 16346 - DNA, 23 bp, synthetic construct
  misc_feature 1..23: note = Synthetic construct
  source 1..23: mol_type = other DNA
gcatgtaaggtatggaccatcga

SEQ ID NO: 16347 - DNA, 23 bp, synthetic construct
  misc_feature 1..23: note = Synthetic construct
  source 1..23: mol_type = other DNA
gcatttaaggtatggaccatcga

SEQ ID NO: 16348 - DNA, 23 bp, synthetic construct
  misc_feature 1..23: note = Synthetic construct
  source 1..23: mol_type = other DNA
gcatcaaaggtatggaccatcga

SEQ ID NO: 16349 - DNA, 23 bp, synthetic construct
  misc_feature 1..23: note = Synthetic construct
  source 1..23: mol_type = other DNA
gcatccaaggtatggaccatcga

SEQ ID NO: 16350 - DNA, 23 bp, synthetic construct
  misc_feature 1..23: note = Synthetic construct
  source 1..23: mol_type = other DNA
gcatcgaaggtatggaccatcga

SEQ ID NO: 16351 - DNA, 23 bp, synthetic construct
  misc_feature 1..23: note = Synthetic construct
  source 1..23: mol_type = other DNA
gcatctcaggtatggaccatcga

SEQ ID NO: 16352 - DNA, 23 bp, synthetic construct
  misc_feature 1..23: note = Synthetic construct
  source 1..23: mol_type = other DNA
gcatctgaggtatggaccatcga

SEQ ID NO: 16353 - DNA, 23 bp, synthetic construct
  misc_feature 1..23: note = Synthetic construct
  source 1..23: mol_type = other DNA
gcatcttaggtatggaccatcga

SEQ ID NO: 16354 - DNA, 23 bp, synthetic construct
  misc_feature 1..23: note = Synthetic construct
  source 1..23: mol_type = other DNA
gcatctacggtatggaccatcga

SEQ ID NO: 16355 - DNA, 23 bp, synthetic construct
  misc_feature 1..23: note = Synthetic construct
  source 1..23: mol_type = other DNA
gcatctagggtatggaccatcga

SEQ ID NO: 16356 - DNA, 23 bp, synthetic construct
  misc_feature 1..23: note = Synthetic construct
  source 1..23: mol_type = other DNA
gcatctatggtatggaccatcga

SEQ ID NO: 16357 - DNA, 23 bp, synthetic construct
  misc_feature 1..23: note = Synthetic construct
  source 1..23: mol_type = other DNA
gcatctaaagtatggaccatcga

SEQ ID NO: 16358 - DNA, 23 bp, synthetic construct
  misc_feature 1..23: note = Synthetic construct
  source 1..23: mol_type = other DNA
gcatctaacgtatggaccatcga

SEQ ID NO: 16359 - DNA, 23 bp, synthetic construct
  misc_feature 1..23: note = Synthetic construct
  source 1..23: mol_type = other DNA
gcatctaatgtatggaccatcga

SEQ ID NO: 16360 - DNA, 23 bp, synthetic construct
  misc_feature 1..23: note = Synthetic construct
  source 1..23: mol_type = other DNA
gcatctaagatatggaccatcga

SEQ ID NO: 16361 - DNA, 23 bp, synthetic construct
  misc_feature 1..23: note = Synthetic construct
  source 1..23: mol_type = other DNA
gcatctaagctatggaccatcga

SEQ ID NO: 16362 - DNA, 23 bp, synthetic construct
  misc_feature 1..23: note = Synthetic construct
  source 1..23: mol_type = other DNA
gcatctaagttatggaccatcga

SEQ ID NO: 16363 - DNA, 23 bp, synthetic construct
  misc_feature 1..23: note = Synthetic construct
  source 1..23: mol_type = other DNA
gcatctaaggaatggaccatcga

SEQ ID NO: 16364 - DNA, 23 bp, synthetic construct
  misc_feature 1..23: note = Synthetic construct
  source 1..23: mol_type = other DNA
gcatctaaggcatggaccatcga

SEQ ID NO: 16365 - DNA, 23 bp, synthetic construct
  misc_feature 1..23: note = Synthetic construct
  source 1..23: mol_type = other DNA
gcatctaagggatggaccatcga

SEQ ID NO: 16366 - DNA, 23 bp, synthetic construct
  misc_feature 1..23: note = Synthetic construct
  source 1..23: mol_type = other DNA
gcatctaaggtctggaccatcga

SEQ ID NO: 16367 - DNA, 23 bp, synthetic construct
  misc_feature 1..23: note = Synthetic construct
  source 1..23: mol_type = other DNA
gcatctaaggtgtggaccatcga

SEQ ID NO: 16368 - DNA, 23 bp, synthetic construct
  misc_feature 1..23: note = Synthetic construct
  source 1..23: mol_type = other DNA
gcatctaaggtttggaccatcga

SEQ ID NO: 16369 - DNA, 23 bp, synthetic construct
  misc_feature 1..23: note = Synthetic construct
  source 1..23: mol_type = other DNA
gcatctaaggtaaggaccatcga

SEQ ID NO: 16370 - DNA, 23 bp, synthetic construct
  misc_feature 1..23: note = Synthetic construct
  source 1..23: mol_type = other DNA
gcatctaaggtacggaccatcga

SEQ ID NO: 16371 - DNA, 23 bp, synthetic construct
  misc_feature 1..23: note = Synthetic construct
  source 1..23: mol_type = other DNA
gcatctaaggtagggaccatcga

SEQ ID NO: 16372 - DNA, 23 bp, synthetic construct
  misc_feature 1..23: note = Synthetic construct
  source 1..23: mol_type = other DNA
gcatctaaggtatagaccatcga

SEQ ID NO: 16373 - DNA, 23 bp, synthetic construct
  misc_feature 1..23: note = Synthetic construct
  source 1..23: mol_type = other DNA
gcatctaaggtatcgaccatcga

SEQ ID NO: 16374 - DNA, 23 bp, synthetic construct
  misc_feature 1..23: note = Synthetic construct
  source 1..23: mol_type = other DNA
gcatctaaggtattgaccatcga

SEQ ID NO: 16375 - DNA, 23 bp, synthetic construct
  misc_feature 1..23: note = Synthetic construct
  source 1..23: mol_type = other DNA
gcatctaaggtatgaaccatcga

SEQ ID NO: 16376 - DNA, 23 bp, synthetic construct
  misc_feature 1..23: note = Synthetic construct
  source 1..23: mol_type = other DNA
gcatctaaggtatgcaccatcga

SEQ ID NO: 16377 - DNA, 23 bp, synthetic construct
  misc_feature 1..23: note = Synthetic construct
  source 1..23: mol_type = other DNA
gcatctaaggtatgtaccatcga

SEQ ID NO: 16378 - DNA, 23 bp, synthetic construct
  misc_feature 1..23: note = Synthetic construct
  source 1..23: mol_type = other DNA
gcatctaaggtatggcccatcga

SEQ ID NO: 16379 - DNA, 23 bp, synthetic construct
  misc_feature 1..23: note = Synthetic construct
  source 1..23: mol_type = other DNA
gcatctaaggtatgggccatcga

SEQ ID NO: 16380 - DNA, 23 bp, synthetic construct
  misc_feature 1..23: note = Synthetic construct
  source 1..23: mol_type = other DNA
gcatctaaggtatggtccatcga

SEQ ID NO: 16381 - DNA, 23 bp, synthetic construct
  misc_feature 1..23: note = Synthetic construct
  source 1..23: mol_type = other DNA
gcatctaaggtatggaacatcga

SEQ ID NO: 16382 - DNA, 23 bp, synthetic construct
  misc_feature 1..23: note = Synthetic construct
  source 1..23: mol_type = other DNA
gcatctaaggtatggagcatcga

SEQ ID NO: 16383 - DNA, 23 bp, synthetic construct
  misc_feature 1..23: note = Synthetic construct
  source 1..23: mol_type = other DNA
gcatctaaggtatggatcatcga

SEQ ID NO: 16384 - DNA, 23 bp, synthetic construct
  misc_feature 1..23: note = Synthetic construct
  source 1..23: mol_type = other DNA
gcatctaaggtatggacaatcga

SEQ ID NO: 16385 - DNA, 23 bp, synthetic construct
  misc_feature 1..23: note = Synthetic construct
  source 1..23: mol_type = other DNA
gcatctaaggtatggacgatcga

SEQ ID NO: 16386 - DNA, 23 bp, synthetic construct
  misc_feature 1..23: note = Synthetic construct
  source 1..23: mol_type = other DNA
gcatctaaggtatggactatcga

SEQ ID NO: 16387 - DNA, 23 bp, synthetic construct
  misc_feature 1..23: note = Synthetic construct
  source 1..23: mol_type = other DNA
gcatctaaggtatggaccctcga

SEQ ID NO: 16388 - DNA, 23 bp, synthetic construct
  misc_feature 1..23: note = Synthetic construct
  source 1..23: mol_type = other DNA
gcatctaaggtatggaccgtcga

SEQ ID NO: 16389 - DNA, 23 bp, synthetic construct
  misc_feature 1..23: note = Synthetic construct
  source 1..23: mol_type = other DNA
gcatctaaggtatggaccttcga

SEQ ID NO: 16390 - DNA, 23 bp, synthetic construct
  misc_feature 1..23: note = Synthetic construct
  source 1..23: mol_type = other DNA
gcatctaaggtatggaccaacga

SEQ ID NO: 16391 - DNA, 23 bp, synthetic construct
  misc_feature 1..23: note = Synthetic construct
  source 1..23: mol_type = other DNA
gcatctaaggtatggaccaccga

SEQ ID NO: 16392 - DNA, 23 bp, synthetic construct
  misc_feature 1..23: note = Synthetic construct
  source 1..23: mol_type = other DNA
gcatctaaggtatggaccagcga

SEQ ID NO: 16393 - DNA, 23 bp, synthetic construct
  misc_feature 1..23: note = Synthetic construct
  source 1..23: mol_type = other DNA
gcatctaaggtatggaccataga

SEQ ID NO: 16394 - DNA, 23 bp, synthetic construct
  misc_feature 1..23: note = Synthetic construct
  source 1..23: mol_type = other DNA
gcatctaaggtatggaccatgga

SEQ ID NO: 16395 - DNA, 23 bp, synthetic construct
  misc_feature 1..23: note = Synthetic construct
  source 1..23: mol_type = other DNA
gcatctaaggtatggaccattga

SEQ ID NO: 16396 - DNA, 23 bp, synthetic construct
  misc_feature 1..23: note = Synthetic construct
  source 1..23: mol_type = other DNA
gcatctaaggtatggaccatcaa

SEQ ID NO: 16397 - DNA, 23 bp, synthetic construct
  misc_feature 1..23: note = Synthetic construct
  source 1..23: mol_type = other DNA
gcatctaaggtatggaccatcca

SEQ ID NO: 16398 - DNA, 23 bp, synthetic construct
  misc_feature 1..23: note = Synthetic construct
  source 1..23: mol_type = other DNA
gcatctaaggtatggaccatcta

SEQ ID NO: 16399 - DNA, 23 bp, synthetic construct
  misc_feature 1..23: note = Synthetic construct
  source 1..23: mol_type = other DNA
gcatctaaggtatggaccatcgc

SEQ ID NO: 16400 - DNA, 23 bp, synthetic construct
  misc_feature 1..23: note = Synthetic construct
  source 1..23: mol_type = other DNA
gcatctaaggtatggaccatcgg

SEQ ID NO: 16401 - DNA, 23 bp, synthetic construct
  misc_feature 1..23: note = Synthetic construct
  source 1..23: mol_type = other DNA
gcatctaaggtatggaccatcgt

SEQ ID NO: 16402 - DNA, 20 bp, synthetic construct
  misc_feature 1..20: note = Synthetic construct
  source 1..20: mol_type = other DNA
ctgccggagtttgctgcgat

SEQ ID NO: 16403 - DNA, 20 bp, synthetic construct
  misc_feature 1..20: note = Synthetic construct
  source 1..20: mol_type = other DNA
gtgccggagtttgctgcgat

SEQ ID NO: 16404 - DNA, 20 bp, synthetic construct
  misc_feature 1..20: note = Synthetic construct
  source 1..20: mol_type = other DNA
ttgccggagtttgctgcgat

SEQ ID NO: 16405 - DNA, 20 bp, synthetic construct
  misc_feature 1..20: note = Synthetic construct
  source 1..20: mol_type = other DNA
aagccggagtttgctgcgat

SEQ ID NO: 16406 - DNA, 20 bp, synthetic construct
  misc_feature 1..20: note = Synthetic construct
  source 1..20: mol_type = other DNA
acgccggagtttgctgcgat

SEQ ID NO: 16407 - DNA, 20 bp, synthetic construct
  misc_feature 1..20: note = Synthetic construct
  source 1..20: mol_type = other DNA
aggccggagtttgctgcgat

SEQ ID NO: 16408 - DNA, 20 bp, synthetic construct
  misc_feature 1..20: note = Synthetic construct
  source 1..20: mol_type = other DNA
ataccggagtttgctgcgat

SEQ ID NO: 16409 - DNA, 20 bp, synthetic construct
  misc_feature 1..20: note = Synthetic construct
  source 1..20: mol_type = other DNA
atcccggagtttgctgcgat

SEQ ID NO: 16410 - DNA, 20 bp, synthetic construct
  misc_feature 1..20: note = Synthetic construct
  source 1..20: mol_type = other DNA
attccggagtttgctgcgat

SEQ ID NO: 16411 - DNA, 20 bp, synthetic construct
  misc_feature 1..20: note = Synthetic construct
  source 1..20: mol_type = other DNA
atgacggagtttgctgcgat

SEQ ID NO: 16412 - DNA, 20 bp, synthetic construct
  misc_feature 1..20: note = Synthetic construct
  source 1..20: mol_type = other DNA
atggcggagtttgctgcgat

SEQ ID NO: 16413 - DNA, 20 bp, synthetic construct
  misc_feature 1..20: note = Synthetic construct
  source 1..20: mol_type = other DNA
atgtcggagtttgctgcgat

SEQ ID NO: 16414 - DNA, 20 bp, synthetic construct
  misc_feature 1..20: note = Synthetic construct
  source 1..20: mol_type = other DNA
atgcaggagtttgctgcgat

SEQ ID NO: 16415 - DNA, 20 bp, synthetic construct
  misc_feature 1..20: note = Synthetic construct
  source 1..20: mol_type = other DNA
atgcgggagtttgctgcgat

SEQ ID NO: 16416 - DNA, 20 bp, synthetic construct
  misc_feature 1..20: note = Synthetic construct
  source 1..20: mol_type = other DNA
atgctggagtttgctgcgat

SEQ ID NO: 16417 - DNA, 20 bp, synthetic construct
  misc_feature 1..20: note = Synthetic construct
  source 1..20: mol_type = other DNA
atgccagagtttgctgcgat

SEQ ID NO: 16418 - DNA, 20 bp, synthetic construct
  misc_feature 1..20: note = Synthetic construct
  source 1..20: mol_type = other DNA
atgcccgagtttgctgcgat

SEQ ID NO: 16419 - DNA, 20 bp, synthetic construct
  misc_feature 1..20: note = Synthetic construct
  source 1..20: mol_type = other DNA
atgcctgagtttgctgcgat

SEQ ID NO: 16420 - DNA, 20 bp, synthetic construct
  misc_feature 1..20: note = Synthetic construct
  source 1..20: mol_type = other DNA
atgccgaagtttgctgcgat

SEQ ID NO: 16421 - DNA, 20 bp, synthetic construct
  misc_feature 1..20: note = Synthetic construct
  source 1..20: mol_type = other DNA
atgccgcagtttgctgcgat

SEQ ID NO: 16422 - DNA, 20 bp, synthetic construct
  misc_feature 1..20: note = Synthetic construct
  source 1..20: mol_type = other DNA
atgccgtagtttgctgcgat

SEQ ID NO: 16423 - DNA, 20 bp, synthetic construct
  misc_feature 1..20: note = Synthetic construct
  source 1..20: mol_type = other DNA
atgccggcgtttgctgcgat

SEQ ID NO: 16424 - DNA, 20 bp, synthetic construct
  misc_feature 1..20: note = Synthetic construct
  source 1..20: mol_type = other DNA
atgccggggtttgctgcgat

SEQ ID NO: 16425 - DNA, 20 bp, synthetic construct
  misc_feature 1..20: note = Synthetic construct
  source 1..20: mol_type = other DNA
atgccggtgtttgctgcgat

SEQ ID NO: 16426 - DNA, 20 bp, synthetic construct
  misc_feature 1..20: note = Synthetic construct
  source 1..20: mol_type = other DNA
atgccggaatttgctgcgat

SEQ ID NO: 16427 - DNA, 20 bp, synthetic construct
  misc_feature 1..20: note = Synthetic construct
  source 1..20: mol_type = other DNA
atgccggactttgctgcgat

SEQ ID NO: 16428 - DNA, 20 bp, synthetic construct
  misc_feature 1..20: note = Synthetic construct
  source 1..20: mol_type = other DNA
atgccggattttgctgcgat

SEQ ID NO: 16429 - DNA, 20 bp, synthetic construct
  misc_feature 1..20: note = Synthetic construct
  source 1..20: mol_type = other DNA
atgccggagattgctgcgat

SEQ ID NO: 16430 - DNA, 20 bp, synthetic construct
  misc_feature 1..20: note = Synthetic construct
  source 1..20: mol_type = other DNA
atgccggagcttgctgcgat

SEQ ID NO: 16431 - DNA, 20 bp, synthetic construct
  misc_feature 1..20: note = Synthetic construct
  source 1..20: mol_type = other DNA
atgccggaggttgctgcgat

SEQ ID NO: 16432 - DNA, 20 bp, synthetic construct
  misc_feature 1..20: note = Synthetic construct
  source 1..20: mol_type = other DNA
atgccggagtatgctgcgat

SEQ ID NO: 16433 - DNA, 20 bp, synthetic construct
  misc_feature 1..20: note = Synthetic construct
  source 1..20: mol_type = other DNA
atgccggagtctgctgcgat

SEQ ID NO: 16434 - DNA, 20 bp, synthetic construct
  misc_feature 1..20: note = Synthetic construct
  source 1..20: mol_type = other DNA
atgccggagtgtgctgcgat

SEQ ID NO: 16435 - DNA, 20 bp, synthetic construct
  misc_feature 1..20: note = Synthetic construct
  source 1..20: mol_type = other DNA
atgccggagttagctgcgat

SEQ ID NO: 16436 - DNA, 20 bp, synthetic construct
  misc_feature 1..20: note = Synthetic construct
  source 1..20: mol_type = other DNA
atgccggagttcgctgcgat

SEQ ID NO: 16437 - DNA, 20 bp, synthetic construct
  misc_feature 1..20: note = Synthetic construct
  source 1..20: mol_type = other DNA
atgccggagttggctgcgat

SEQ ID NO: 16438 - DNA, 20 bp, synthetic construct
  misc_feature 1..20: note = Synthetic construct
  source 1..20: mol_type = other DNA
atgccggagtttactgcgat

SEQ ID NO: 16439 - DNA, 20 bp, synthetic construct
  misc_feature 1..20: note = Synthetic construct
  source 1..20: mol_type = other DNA
atgccggagtttcctgcgat

SEQ ID NO: 16440 - DNA, 20 bp, synthetic construct
  misc_feature 1..20: note = Synthetic construct
  source 1..20: mol_type = other DNA
atgccggagttttctgcgat

SEQ ID NO: 16441 - DNA, 20 bp, synthetic construct
  misc_feature 1..20: note = Synthetic construct
  source 1..20: mol_type = other DNA
atgccggagtttgatgcgat

SEQ ID NO: 16442 - DNA, 20 bp, synthetic construct
  misc_feature 1..20: note = Synthetic construct
  source 1..20: mol_type = other DNA
atgccggagtttggtgcgat

SEQ ID NO: 16443 - DNA, 20 bp, synthetic construct
  misc_feature 1..20: note = Synthetic construct
  source 1..20: mol_type = other DNA
atgccggagtttgttgcgat

SEQ ID NO: 16444 - DNA, 20 bp, synthetic construct
  misc_feature 1..20: note = Synthetic construct
  source 1..20: mol_type = other DNA
atgccggagtttgcagcgat

SEQ ID NO: 16445 - DNA, 20 bp, synthetic construct
  misc_feature 1..20: note = Synthetic construct
  source 1..20: mol_type = other DNA
atgccggagtttgccgcgat

SEQ ID NO: 16446 - DNA, 20 bp, synthetic construct
  misc_feature 1..20: note = Synthetic construct
  source 1..20: mol_type = other DNA
atgccggagtttgcggcgat

SEQ ID NO: 16447 - DNA, 20 bp, synthetic construct
  misc_feature 1..20: note = Synthetic construct
  source 1..20: mol_type = other DNA
atgccggagtttgctacgat

SEQ ID NO: 16448 - DNA, 20 bp, synthetic construct
  misc_feature 1..20: note = Synthetic construct
  source 1..20: mol_type = other DNA
atgccggagtttgctccgat

SEQ ID NO: 16449 - DNA, 20 bp, synthetic construct
  misc_feature 1..20: note = Synthetic construct
  source 1..20: mol_type = other DNA
atgccggagtttgcttcgat

SEQ ID NO: 16450 - DNA, 20 bp, synthetic construct
  misc_feature 1..20: note = Synthetic construct
  source 1..20: mol_type = other DNA
atgccggagtttgctgagat

SEQ ID NO: 16451 - DNA, 20 bp, synthetic construct
  misc_feature 1..20: note = Synthetic construct
  source 1..20: mol_type = other DNA
atgccggagtttgctgggat

SEQ ID NO: 16452 - DNA, 20 bp, synthetic construct
  misc_feature 1..20: note = Synthetic construct
  source 1..20: mol_type = other DNA
atgccggagtttgctgtgat

SEQ ID NO: 16453 - DNA, 20 bp, synthetic construct
  misc_feature 1..20: note = Synthetic construct
  source 1..20: mol_type = other DNA
atgccggagtttgctgcaat

SEQ ID NO: 16454 - DNA, 20 bp, synthetic construct
  misc_feature 1..20: note = Synthetic construct
  source 1..20: mol_type = other DNA
atgccggagtttgctgccat

SEQ ID NO: 16455 - DNA, 20 bp, synthetic construct
  misc_feature 1..20: note = Synthetic construct
  source 1..20: mol_type = other DNA
atgccggagtttgctgctat

SEQ ID NO: 16456 - DNA, 20 bp, synthetic construct
  misc_feature 1..20: note = Synthetic construct
  source 1..20: mol_type = other DNA
atgccggagtttgctgcgct

SEQ ID NO: 16457 - DNA, 20 bp, synthetic construct
  misc_feature 1..20: note = Synthetic construct
  source 1..20: mol_type = other DNA
atgccggagtttgctgcggt

SEQ ID NO: 16458 - DNA, 20 bp, synthetic construct
  misc_feature 1..20: note = Synthetic construct
  source 1..20: mol_type = other DNA
atgccggagtttgctgcgtt

SEQ ID NO: 16459 - DNA, 20 bp, synthetic construct
  misc_feature 1..20: note = Synthetic construct
  source 1..20: mol_type = other DNA
atgccggagtttgctgcgaa

SEQ ID NO: 16460 - DNA, 20 bp, synthetic construct
  misc_feature 1..20: note = Synthetic construct
  source 1..20: mol_type = other DNA
atgccggagtttgctgcgac

SEQ ID NO: 16461 - DNA, 20 bp, synthetic construct
  misc_feature 1..20: note = Synthetic construct
  source 1..20: mol_type = other DNA
atgccggagtttgctgcgag

SEQ ID NO: 16462 - DNA, 21 bp, synthetic construct
  misc_feature 1..21: note = Synthetic construct
  source 1..21: mol_type = other DNA
aagggagaagccgaaaccggc

SEQ ID NO: 16463 - DNA, 21 bp, synthetic construct
  misc_feature 1..21: note = Synthetic construct
  source 1..21: mol_type = other DNA
cagggagaagccgaaaccggc

SEQ ID NO: 16464 - DNA, 21 bp, synthetic construct
  misc_feature 1..21: note = Synthetic construct
  source 1..21: mol_type = other DNA
tagggagaagccgaaaccggc

SEQ ID NO: 16465 - DNA, 21 bp, synthetic construct
  misc_feature 1..21: note = Synthetic construct
  source 1..21: mol_type = other DNA
gcgggagaagccgaaaccggc

SEQ ID NO: 16466 - DNA, 21 bp, synthetic construct
  misc_feature 1..21: note = Synthetic construct
  source 1..21: mol_type = other DNA
gggggagaagccgaaaccggc

SEQ ID NO: 16467 - DNA, 21 bp, synthetic construct
  misc_feature 1..21: note = Synthetic construct
  source 1..21: mol_type = other DNA
gtgggagaagccgaaaccggc

SEQ ID NO: 16468 - DNA, 21 bp, synthetic construct
  misc_feature 1..21: note = Synthetic construct
  source 1..21: mol_type = other DNA
gaaggagaagccgaaaccggc

SEQ ID NO: 16469 - DNA, 21 bp, synthetic construct
  misc_feature 1..21: note = Synthetic construct
  source 1..21: mol_type = other DNA
gacggagaagccgaaaccggc

SEQ ID NO: 16470 - DNA, 21 bp, synthetic construct
  misc_feature 1..21: note = Synthetic construct
  source 1..21: mol_type = other DNA
gatggagaagccgaaaccggc

SEQ ID NO: 16471 - DNA, 21 bp, synthetic construct
  misc_feature 1..21: note = Synthetic construct
  source 1..21: mol_type = other DNA
gagagagaagccgaaaccggc

SEQ ID NO: 16472 - DNA, 21 bp, synthetic construct
  misc_feature 1..21: note = Synthetic construct
  source 1..21: mol_type = other DNA
gagcgagaagccgaaaccggc

SEQ ID NO: 16473 - DNA, 21 bp, synthetic construct
  misc_feature 1..21: note = Synthetic construct
  source 1..21: mol_type = other DNA
gagtgagaagccgaaaccggc

SEQ ID NO: 16474 - DNA, 21 bp, synthetic construct
  misc_feature 1..21: note = Synthetic construct
  source 1..21: mol_type = other DNA
gaggaagaagccgaaaccggc

SEQ ID NO: 16475 - DNA, 21 bp, synthetic construct
  misc_feature 1..21: note = Synthetic construct
  source 1..21: mol_type = other DNA
gaggcagaagccgaaaccggc

SEQ ID NO: 16476 - DNA, 21 bp, synthetic construct
  misc_feature 1..21: note = Synthetic construct
  source 1..21: mol_type = other DNA
gaggtagaagccgaaaccggc

SEQ ID NO: 16477 - DNA, 21 bp, synthetic construct
  misc_feature 1..21: note = Synthetic construct
  source 1..21: mol_type = other DNA
gagggcgaagccgaaaccggc

SEQ ID NO: 16478 - DNA, 21 bp, synthetic construct
  misc_feature 1..21: note = Synthetic construct
  source 1..21: mol_type = other DNA
gagggggaagccgaaaccggc

SEQ ID NO: 16479 - DNA, 21 bp, synthetic construct
  misc_feature 1..21: note = Synthetic construct
  source 1..21: mol_type = other DNA
gagggtgaagccgaaaccggc

SEQ ID NO: 16480 - DNA, 21 bp, synthetic construct
  misc_feature 1..21: note = Synthetic construct
  source 1..21: mol_type = other DNA
gagggaaaagccgaaaccggc

SEQ ID NO: 16481 - DNA, 21 bp, synthetic construct
  misc_feature 1..21: note = Synthetic construct
  source 1..21: mol_type = other DNA
gagggacaagccgaaaccggc

SEQ ID NO: 16482 - DNA, 21 bp, synthetic construct
  misc_feature 1..21: note = Synthetic construct
  source 1..21: mol_type = other DNA
gagggataagccgaaaccggc

SEQ ID NO: 16483 - DNA, 21 bp, synthetic construct
  misc_feature 1..21: note = Synthetic construct
  source 1..21: mol_type = other DNA
gagggagcagccgaaaccggc

SEQ ID NO: 16484 - DNA, 21 bp, synthetic construct
  misc_feature 1..21: note = Synthetic construct
  source 1..21: mol_type = other DNA
gagggaggagccgaaaccggc

SEQ ID NO: 16485 - DNA, 21 bp, synthetic construct
  misc_feature 1..21: note = Synthetic construct
  source 1..21: mol_type = other DNA
gagggagtagccgaaaccggc

SEQ ID NO: 16486 - DNA, 21 bp, synthetic construct
  misc_feature 1..21: note = Synthetic construct
  source 1..21: mol_type = other DNA
gagggagacgccgaaaccggc

SEQ ID NO: 16487 - DNA, 21 bp, synthetic construct
  misc_feature 1..21: note = Synthetic construct
  source 1..21: mol_type = other DNA
gagggagaggccgaaaccggc

SEQ ID NO: 16488 - DNA, 21 bp, synthetic construct
  misc_feature 1..21: note = Synthetic construct
  source 1..21: mol_type = other DNA
gagggagatgccgaaaccggc

SEQ ID NO: 16489 - DNA, 21 bp, synthetic construct
  misc_feature 1..21: note = Synthetic construct
  source 1..21: mol_type = other DNA
gagggagaaaccgaaaccggc

SEQ ID NO: 16490 - DNA, 21 bp, synthetic construct
  misc_feature 1..21: note = Synthetic construct
  source 1..21: mol_type = other DNA
gagggagaacccgaaaccggc

SEQ ID NO: 16491 - DNA, 21 bp, synthetic construct
  misc_feature 1..21: note = Synthetic construct
  source 1..21: mol_type = other DNA
gagggagaatccgaaaccggc

SEQ ID NO: 16492 - DNA, 21 bp, synthetic construct
  misc_feature 1..21: note = Synthetic construct
  source 1..21: mol_type = other DNA
gagggagaagacgaaaccggc

SEQ ID NO: 16493 - DNA, 21 bp, synthetic construct
  misc_feature 1..21: note = Synthetic construct
  source 1..21: mol_type = other DNA
gagggagaaggcgaaaccggc

SEQ ID NO: 16494 - DNA, 21 bp, synthetic construct
  misc_feature 1..21: note = Synthetic construct
  source 1..21: mol_type = other DNA
gagggagaagtcgaaaccggc

SEQ ID NO: 16495 - DNA, 21 bp, synthetic construct
  misc_feature 1..21: note = Synthetic construct
  source 1..21: mol_type = other DNA
gagggagaagcagaaaccggc

SEQ ID NO: 16496 - DNA, 21 bp, synthetic construct
  misc_feature 1..21: note = Synthetic construct
  source 1..21: mol_type = other DNA
gagggagaagcggaaaccggc

SEQ ID NO: 16497 - DNA, 21 bp, synthetic construct
  misc_feature 1..21: note = Synthetic construct
  source 1..21: mol_type = other DNA
gagggagaagctgaaaccggc

SEQ ID NO: 16498 - DNA, 21 bp, synthetic construct
  misc_feature 1..21: note = Synthetic construct
  source 1..21: mol_type = other DNA
gagggagaagccaaaaccggc

SEQ ID NO: 16499 - DNA, 21 bp, synthetic construct
  misc_feature 1..21: note = Synthetic construct
  source 1..21: mol_type = other DNA
gagggagaagcccaaaccggc

SEQ ID NO: 16500 - DNA, 21 bp, synthetic construct
  misc_feature 1..21: note = Synthetic construct
  source 1..21: mol_type = other DNA
gagggagaagcctaaaccggc

SEQ ID NO: 16501 - DNA, 21 bp, synthetic construct
  misc_feature 1..21: note = Synthetic construct
  source 1..21: mol_type = other DNA
gagggagaagccgcaaccggc

SEQ ID NO: 16502 - DNA, 21 bp, synthetic construct
  misc_feature 1..21: note = Synthetic construct
  source 1..21: mol_type = other DNA
gagggagaagccggaaccggc

SEQ ID NO: 16503 - DNA, 21 bp, synthetic construct
  misc_feature 1..21: note = Synthetic construct
  source 1..21: mol_type = other DNA
gagggagaagccgtaaccggc

SEQ ID NO: 16504 - DNA, 21 bp, synthetic construct
  misc_feature 1..21: note = Synthetic construct
  source 1..21: mol_type = other DNA
gagggagaagccgacaccggc

SEQ ID NO: 16505 - DNA, 21 bp, synthetic construct
  misc_feature 1..21: note = Synthetic construct
  source 1..21: mol_type = other DNA
gagggagaagccgagaccggc

SEQ ID NO: 16506 - DNA, 21 bp, synthetic construct
  misc_feature 1..21: note = Synthetic construct
  source 1..21: mol_type = other DNA
gagggagaagccgataccggc

SEQ ID NO: 16507 - DNA, 21 bp, synthetic construct
  misc_feature 1..21: note = Synthetic construct
  source 1..21: mol_type = other DNA
gagggagaagccgaacccggc

SEQ ID NO: 16508 - DNA, 21 bp, synthetic construct
  misc_feature 1..21: note = Synthetic construct
  source 1..21: mol_type = other DNA
gagggagaagccgaagccggc

SEQ ID NO: 16509 - DNA, 21 bp, synthetic construct
  misc_feature 1..21: note = Synthetic construct
  source 1..21: mol_type = other DNA
gagggagaagccgaatccggc

SEQ ID NO: 16510 - DNA, 21 bp, synthetic construct
  misc_feature 1..21: note = Synthetic construct
  source 1..21: mol_type = other DNA
gagggagaagccgaaaacggc

SEQ ID NO: 16511 - DNA, 21 bp, synthetic construct
  misc_feature 1..21: note = Synthetic construct
  source 1..21: mol_type = other DNA
gagggagaagccgaaagcggc

SEQ ID NO: 16512 - DNA, 21 bp, synthetic construct
  misc_feature 1..21: note = Synthetic construct
  source 1..21: mol_type = other DNA
gagggagaagccgaaatcggc

SEQ ID NO: 16513 - DNA, 21 bp, synthetic construct
  misc_feature 1..21: note = Synthetic construct
  source 1..21: mol_type = other DNA
gagggagaagccgaaacaggc

SEQ ID NO: 16514 - DNA, 21 bp, synthetic construct
  misc_feature 1..21: note = Synthetic construct
  source 1..21: mol_type = other DNA
gagggagaagccgaaacgggc

SEQ ID NO: 16515 - DNA, 21 bp, synthetic construct
  misc_feature 1..21: note = Synthetic construct
  source 1..21: mol_type = other DNA
gagggagaagccgaaactggc

SEQ ID NO: 16516 - DNA, 21 bp, synthetic construct
  misc_feature 1..21: note = Synthetic construct
  source 1..21: mol_type = other DNA
gagggagaagccgaaaccagc

SEQ ID NO: 16517 - DNA, 21 bp, synthetic construct
  misc_feature 1..21: note = Synthetic construct
  source 1..21: mol_type = other DNA
gagggagaagccgaaacccgc

SEQ ID NO: 16518 - DNA, 21 bp, synthetic construct
  misc_feature 1..21: note = Synthetic construct
  source 1..21: mol_type = other DNA
gagggagaagccgaaacctgc

SEQ ID NO: 16519 - DNA, 21 bp, synthetic construct
  misc_feature 1..21: note = Synthetic construct
  source 1..21: mol_type = other DNA
gagggagaagccgaaaccgac

SEQ ID NO: 16520 - DNA, 21 bp, synthetic construct
  misc_feature 1..21: note = Synthetic construct
  source 1..21: mol_type = other DNA
gagggagaagccgaaaccgcc

SEQ ID NO: 16521 - DNA, 21 bp, synthetic construct
  misc_feature 1..21: note = Synthetic construct
  source 1..21: mol_type = other DNA
gagggagaagccgaaaccgtc

SEQ ID NO: 16522 - DNA, 21 bp, synthetic construct
  misc_feature 1..21: note = Synthetic construct
  source 1..21: mol_type = other DNA
gagggagaagccgaaaccgga

SEQ ID NO: 16523 - DNA, 21 bp, synthetic construct
  misc_feature 1..21: note = Synthetic construct
  source 1..21: mol_type = other DNA
gagggagaagccgaaaccggg

SEQ ID NO: 16524 - DNA, 21 bp, synthetic construct
  misc_feature 1..21: note = Synthetic construct
  source 1..21: mol_type = other DNA
gagggagaagccgaaaccggt

SEQ ID NO: 16525 - DNA, 21 bp, synthetic construct
  misc_feature 1..21: note = Synthetic construct
  source 1..21: mol_type = other DNA
acacggtaaaagtgcgcgccg

SEQ ID NO: 16526 - DNA, 21 bp, synthetic construct
  misc_feature 1..21: note = Synthetic construct
  source 1..21: mol_type = other DNA
gcacggtaaaagtgcgcgccg

SEQ ID NO: 16527 - DNA, 21 bp, synthetic construct
  misc_feature 1..21: note = Synthetic construct
  source 1..21: mol_type = other DNA
tcacggtaaaagtgcgcgccg

SEQ ID NO: 16528 - DNA, 21 bp, synthetic construct
  misc_feature 1..21: note = Synthetic construct
  source 1..21: mol_type = other DNA
caacggtaaaagtgcgcgccg

SEQ ID NO: 16529 - DNA, 21 bp, synthetic construct
  misc_feature 1..21: note = Synthetic construct
  source 1..21: mol_type = other DNA
cgacggtaaaagtgcgcgccg

SEQ ID NO: 16530 - DNA, 21 bp, synthetic construct
  misc_feature 1..21: note = Synthetic construct
  source 1..21: mol_type = other DNA
ctacggtaaaagtgcgcgccg

SEQ ID NO: 16531 - DNA, 21 bp, synthetic construct
  misc_feature 1..21: note = Synthetic construct
  source 1..21: mol_type = other DNA
ccccggtaaaagtgcgcgccg

SEQ ID NO: 16532 - DNA, 21 bp, synthetic construct
  misc_feature 1..21: note = Synthetic construct
  source 1..21: mol_type = other DNA
ccgcggtaaaagtgcgcgccg

SEQ ID NO: 16533 - DNA, 21 bp, synthetic construct
  misc_feature 1..21: note = Synthetic construct
  source 1..21: mol_type = other DNA
cctcggtaaaagtgcgcgccg

SEQ ID NO: 16534 - DNA, 21 bp, synthetic construct
  misc_feature 1..21: note = Synthetic construct
  source 1..21: mol_type = other DNA
ccaaggtaaaagtgcgcgccg

SEQ ID NO: 16535 - DNA, 21 bp, synthetic construct
  misc_feature 1..21: note = Synthetic construct
  source 1..21: mol_type = other DNA
ccagggtaaaagtgcgcgccg

SEQ ID NO: 16536 - DNA, 21 bp, synthetic construct
  misc_feature 1..21: note = Synthetic construct
  source 1..21: mol_type = other DNA
ccatggtaaaagtgcgcgccg

SEQ ID NO: 16537 - DNA, 21 bp, synthetic construct
  misc_feature 1..21: note = Synthetic construct
  source 1..21: mol_type = other DNA
ccacagtaaaagtgcgcgccg

SEQ ID NO: 16538 - DNA, 21 bp, synthetic construct
  misc_feature 1..21: note = Synthetic construct
  source 1..21: mol_type = other DNA
ccaccgtaaaagtgcgcgccg

SEQ ID NO: 16539 - DNA, 21 bp, synthetic construct
  misc_feature 1..21: note = Synthetic construct
  source 1..21: mol_type = other DNA
ccactgtaaaagtgcgcgccg

SEQ ID NO: 16540 - DNA, 21 bp, synthetic construct
  misc_feature 1..21: note = Synthetic construct
  source 1..21: mol_type = other DNA
ccacgataaaagtgcgcgccg

SEQ ID NO: 16541 - DNA, 21 bp, synthetic construct
  misc_feature 1..21: note = Synthetic construct
  source 1..21: mol_type = other DNA
ccacgctaaaagtgcgcgccg

SEQ ID NO: 16542 - DNA, 21 bp, synthetic construct
  misc_feature 1..21: note = Synthetic construct
  source 1..21: mol_type = other DNA
ccacgttaaaagtgcgcgccg

SEQ ID NO: 16543 - DNA, 21 bp, synthetic construct
  misc_feature 1..21: note = Synthetic construct
  source 1..21: mol_type = other DNA
ccacggaaaaagtgcgcgccg

SEQ ID NO: 16544 - DNA, 21 bp, synthetic construct
  misc_feature 1..21: note = Synthetic construct
  source 1..21: mol_type = other DNA
ccacggcaaaagtgcgcgccg

SEQ ID NO: 16545 - DNA, 21 bp, synthetic construct
  misc_feature 1..21: note = Synthetic construct
  source 1..21: mol_type = other DNA
ccacgggaaaagtgcgcgccg

SEQ ID NO: 16546 - DNA, 21 bp, synthetic construct
  misc_feature 1..21: note = Synthetic construct
  source 1..21: mol_type = other DNA
ccacggtcaaagtgcgcgccg

SEQ ID NO: 16547 - DNA, 21 bp, synthetic construct
  misc_feature 1..21: note = Synthetic construct
  source 1..21: mol_type = other DNA
ccacggtgaaagtgcgcgccg

SEQ ID NO: 16548 - DNA, 21 bp, synthetic construct
  misc_feature 1..21: note = Synthetic construct
  source 1..21: mol_type = other DNA
ccacggttaaagtgcgcgccg

SEQ ID NO: 16549 - DNA, 21 bp, synthetic construct
  misc_feature 1..21: note = Synthetic construct
  source 1..21: mol_type = other DNA
ccacggtacaagtgcgcgccg

SEQ ID NO: 16550 - DNA, 21 bp, synthetic construct
  misc_feature 1..21: note = Synthetic construct
  source 1..21: mol_type = other DNA
ccacggtagaagtgcgcgccg

SEQ ID NO: 16551 - DNA, 21 bp, synthetic construct
  misc_feature 1..21: note = Synthetic construct
  source 1..21: mol_type = other DNA
ccacggtataagtgcgcgccg

SEQ ID NO: 16552 - DNA, 21 bp, synthetic construct
  misc_feature 1..21: note = Synthetic construct
  source 1..21: mol_type = other DNA
ccacggtaacagtgcgcgccg

SEQ ID NO: 16553 - DNA, 21 bp, synthetic construct
  misc_feature 1..21: note = Synthetic construct
  source 1..21: mol_type = other DNA
ccacggtaagagtgcgcgccg

SEQ ID NO: 16554 - DNA, 21 bp, synthetic construct
  misc_feature 1..21: note = Synthetic construct
  source 1..21: mol_type = other DNA
ccacggtaatagtgcgcgccg

SEQ ID NO: 16555 - DNA, 21 bp, synthetic construct
  misc_feature 1..21: note = Synthetic construct
  source 1..21: mol_type = other DNA
ccacggtaaacgtgcgcgccg

SEQ ID NO: 16556 - DNA, 21 bp, synthetic construct
  misc_feature 1..21: note = Synthetic construct
  source 1..21: mol_type = other DNA
ccacggtaaaggtgcgcgccg

SEQ ID NO: 16557 - DNA, 21 bp, synthetic construct
  misc_feature 1..21: note = Synthetic construct
  source 1..21: mol_type = other DNA
ccacggtaaatgtgcgcgccg

SEQ ID NO: 16558 - DNA, 21 bp, synthetic construct
  misc_feature 1..21: note = Synthetic construct
  source 1..21: mol_type = other DNA
ccacggtaaaaatgcgcgccg

SEQ ID NO: 16559 - DNA, 21 bp, synthetic construct
  misc_feature 1..21: note = Synthetic construct
  source 1..21: mol_type = other DNA
ccacggtaaaactgcgcgccg

SEQ ID NO: 16560 - DNA, 21 bp, synthetic construct
  misc_feature 1..21: note = Synthetic construct
  source 1..21: mol_type = other DNA
ccacggtaaaattgcgcgccg

SEQ ID NO: 16561 - DNA, 21 bp, synthetic construct
  misc_feature 1..21: note = Synthetic construct
  source 1..21: mol_type = other DNA
ccacggtaaaagagcgcgccg

SEQ ID NO: 16562 - DNA, 21 bp, synthetic construct
  misc_feature 1..21: note = Synthetic construct
  source 1..21: mol_type = other DNA
ccacggtaaaagcgcgcgccg

SEQ ID NO: 16563 - DNA, 21 bp, synthetic construct
  misc_feature 1..21: note = Synthetic construct
  source 1..21: mol_type = other DNA
ccacggtaaaagggcgcgccg

SEQ ID NO: 16564 - DNA, 21 bp, synthetic construct
  misc_feature 1..21: note = Synthetic construct
  source 1..21: mol_type = other DNA
ccacggtaaaagtacgcgccg

SEQ ID NO: 16565 - DNA, 21 bp, synthetic construct
  misc_feature 1..21: note = Synthetic construct
  source 1..21: mol_type = other DNA
ccacggtaaaagtccgcgccg

SEQ ID NO: 16566 - DNA, 21 bp, synthetic construct
  misc_feature 1..21: note = Synthetic construct
  source 1..21: mol_type = other DNA
ccacggtaaaagttcgcgccg

SEQ ID NO: 16567 - DNA, 21 bp, synthetic construct
  misc_feature 1..21: note = Synthetic construct
  source 1..21: mol_type = other DNA
ccacggtaaaagtgagcgccg

SEQ ID NO: 16568 - DNA, 21 bp, synthetic construct
  misc_feature 1..21: note = Synthetic construct
  source 1..21: mol_type = other DNA
ccacggtaaaagtgggcgccg

SEQ ID NO: 16569 - DNA, 21 bp, synthetic construct
  misc_feature 1..21: note = Synthetic construct
  source 1..21: mol_type = other DNA
ccacggtaaaagtgtgcgccg

SEQ ID NO: 16570 - DNA, 21 bp, synthetic construct
  misc_feature 1..21: note = Synthetic construct
  source 1..21: mol_type = other DNA
ccacggtaaaagtgcacgccg

SEQ ID NO: 16571 - DNA, 21 bp, synthetic construct
  misc_feature 1..21: note = Synthetic construct
  source 1..21: mol_type = other DNA
ccacggtaaaagtgcccgccg

SEQ ID NO: 16572 - DNA, 21 bp, synthetic construct
  misc_feature 1..21: note = Synthetic construct
  source 1..21: mol_type = other DNA
ccacggtaaaagtgctcgccg

SEQ ID NO: 16573 - DNA, 21 bp, synthetic construct
  misc_feature 1..21: note = Synthetic construct
  source 1..21: mol_type = other DNA
ccacggtaaaagtgcgagccg

SEQ ID NO: 16574 - DNA, 21 bp, synthetic construct
  misc_feature 1..21: note = Synthetic construct
  source 1..21: mol_type = other DNA
ccacggtaaaagtgcgggccg

SEQ ID NO: 16575 - DNA, 21 bp, synthetic construct
  misc_feature 1..21: note = Synthetic construct
  source 1..21: mol_type = other DNA
ccacggtaaaagtgcgtgccg

SEQ ID NO: 16576 - DNA, 21 bp, synthetic construct
  misc_feature 1..21: note = Synthetic construct
  source 1..21: mol_type = other DNA
ccacggtaaaagtgcgcaccg

SEQ ID NO: 16577 - DNA, 21 bp, synthetic construct
  misc_feature 1..21: note = Synthetic construct
  source 1..21: mol_type = other DNA
ccacggtaaaagtgcgccccg

SEQ ID NO: 16578 - DNA, 21 bp, synthetic construct
  misc_feature 1..21: note = Synthetic construct
  source 1..21: mol_type = other DNA
ccacggtaaaagtgcgctccg

SEQ ID NO: 16579 - DNA, 21 bp, synthetic construct
  misc_feature 1..21: note = Synthetic construct
  source 1..21: mol_type = other DNA
ccacggtaaaagtgcgcgacg

SEQ ID NO: 16580 - DNA, 21 bp, synthetic construct
  misc_feature 1..21: note = Synthetic construct
  source 1..21: mol_type = other DNA
ccacggtaaaagtgcgcggcg

SEQ ID NO: 16581 - DNA, 21 bp, synthetic construct
  misc_feature 1..21: note = Synthetic construct
  source 1..21: mol_type = other DNA
ccacggtaaaagtgcgcgtcg

SEQ ID NO: 16582 - DNA, 21 bp, synthetic construct
  misc_feature 1..21: note = Synthetic construct
  source 1..21: mol_type = other DNA
ccacggtaaaagtgcgcgcag

SEQ ID NO: 16583 - DNA, 21 bp, synthetic construct
  misc_feature 1..21: note = Synthetic construct
  source 1..21: mol_type = other DNA
ccacggtaaaagtgcgcgcgg

SEQ ID NO: 16584 - DNA, 21 bp, synthetic construct
  misc_feature 1..21: note = Synthetic construct
  source 1..21: mol_type = other DNA
ccacggtaaaagtgcgcgctg

SEQ ID NO: 16585 - DNA, 21 bp, synthetic construct
  misc_feature 1..21: note = Synthetic construct
  source 1..21: mol_type = other DNA
ccacggtaaaagtgcgcgcca

SEQ ID NO: 16586 - DNA, 21 bp, synthetic construct
  misc_feature 1..21: note = Synthetic construct
  source 1..21: mol_type = other DNA
ccacggtaaaagtgcgcgccc

SEQ ID NO: 16587 - DNA, 21 bp, synthetic construct
  misc_feature 1..21: note = Synthetic construct
  source 1..21: mol_type = other DNA
ccacggtaaaagtgcgcgcct

SEQ ID NO: 16588 - DNA, 21 bp, synthetic construct
  misc_feature 1..21: note = Synthetic construct
  source 1..21: mol_type = other DNA
acggcgttagccactccgaag

SEQ ID NO: 16589 - DNA, 21 bp, synthetic construct
  misc_feature 1..21: note = Synthetic construct
  source 1..21: mol_type = other DNA
gcggcgttagccactccgaag

SEQ ID NO: 16590 - DNA, 21 bp, synthetic construct
  misc_feature 1..21: note = Synthetic construct
  source 1..21: mol_type = other DNA
tcggcgttagccactccgaag

SEQ ID NO: 16591 - DNA, 21 bp, synthetic construct
  misc_feature 1..21: note = Synthetic construct
  source 1..21: mol_type = other DNA
caggcgttagccactccgaag

SEQ ID NO: 16592 - DNA, 21 bp, synthetic construct
  misc_feature 1..21: note = Synthetic construct
  source 1..21: mol_type = other DNA
cgggcgttagccactccgaag

SEQ ID NO: 16593 - DNA, 21 bp, synthetic construct
  misc_feature 1..21: note = Synthetic construct
  source 1..21: mol_type = other DNA
ctggcgttagccactccgaag

SEQ ID NO: 16594 - DNA, 21 bp, synthetic construct
  misc_feature 1..21: note = Synthetic construct
  source 1..21: mol_type = other DNA
ccagcgttagccactccgaag

SEQ ID NO: 16595 - DNA, 21 bp, synthetic construct
  misc_feature 1..21: note = Synthetic construct
  source 1..21: mol_type = other DNA
cccgcgttagccactccgaag

SEQ ID NO: 16596 - DNA, 21 bp, synthetic construct
  misc_feature 1..21: note = Synthetic construct
  source 1..21: mol_type = other DNA
cctgcgttagccactccgaag

SEQ ID NO: 16597 - DNA, 21 bp, synthetic construct
  misc_feature 1..21: note = Synthetic construct
  source 1..21: mol_type = other DNA
ccgacgttagccactccgaag

SEQ ID NO: 16598 - DNA, 21 bp, synthetic construct
  misc_feature 1..21: note = Synthetic construct
  source 1..21: mol_type = other DNA
ccgccgttagccactccgaag

SEQ ID NO: 16599 - DNA, 21 bp, synthetic construct
  misc_feature 1..21: note = Synthetic construct
  source 1..21: mol_type = other DNA
ccgtcgttagccactccgaag

SEQ ID NO: 16600 - DNA, 21 bp, synthetic construct
  misc_feature 1..21: note = Synthetic construct
  source 1..21: mol_type = other DNA
ccggagttagccactccgaag

SEQ ID NO: 16601 - DNA, 21 bp, synthetic construct
  misc_feature 1..21: note = Synthetic construct
  source 1..21: mol_type = other DNA
ccggggttagccactccgaag

SEQ ID NO: 16602 - DNA, 21 bp, synthetic construct
  misc_feature 1..21: note = Synthetic construct
  source 1..21: mol_type = other DNA
ccggtgttagccactccgaag

SEQ ID NO: 16603 - DNA, 21 bp, synthetic construct
  misc_feature 1..21: note = Synthetic construct
  source 1..21: mol_type = other DNA
ccggcattagccactccgaag

SEQ ID NO: 16604 - DNA, 21 bp, synthetic construct
  misc_feature 1..21: note = Synthetic construct
  source 1..21: mol_type = other DNA
ccggccttagccactccgaag

SEQ ID NO: 16605 - DNA, 21 bp, synthetic construct
  misc_feature 1..21: note = Synthetic construct
  source 1..21: mol_type = other DNA
ccggctttagccactccgaag

SEQ ID NO: 16606 - DNA, 21 bp, synthetic construct
  misc_feature 1..21: note = Synthetic construct
  source 1..21: mol_type = other DNA
ccggcgatagccactccgaag

SEQ ID NO: 16607 - DNA, 21 bp, synthetic construct
  misc_feature 1..21: note = Synthetic construct
  source 1..21: mol_type = other DNA
ccggcgctagccactccgaag

SEQ ID NO: 16608 - DNA, 21 bp, synthetic construct
  misc_feature 1..21: note = Synthetic construct
  source 1..21: mol_type = other DNA
ccggcggtagccactccgaag

SEQ ID NO: 16609 - DNA, 21 bp, synthetic construct
  misc_feature 1..21: note = Synthetic construct
  source 1..21: mol_type = other DNA
ccggcgtaagccactccgaag

SEQ ID NO: 16610 - DNA, 21 bp, synthetic construct
  misc_feature 1..21: note = Synthetic construct
  source 1..21: mol_type = other DNA
ccggcgtcagccactccgaag

SEQ ID NO: 16611 - DNA, 21 bp, synthetic construct
  misc_feature 1..21: note = Synthetic construct
  source 1..21: mol_type = other DNA
ccggcgtgagccactccgaag

SEQ ID NO: 16612 - DNA, 21 bp, synthetic construct
  misc_feature 1..21: note = Synthetic construct
  source 1..21: mol_type = other DNA
ccggcgttcgccactccgaag

SEQ ID NO: 16613 - DNA, 21 bp, synthetic construct
  misc_feature 1..21: note = Synthetic construct
  source 1..21: mol_type = other DNA
ccggcgttggccactccgaag

SEQ ID NO: 16614 - DNA, 21 bp, synthetic construct
  misc_feature 1..21: note = Synthetic construct
  source 1..21: mol_type = other DNA
ccggcgtttgccactccgaag

SEQ ID NO: 16615 - DNA, 21 bp, synthetic construct
  misc_feature 1..21: note = Synthetic construct
  source 1..21: mol_type = other DNA
ccggcgttaaccactccgaag

SEQ ID NO: 16616 - DNA, 21 bp, synthetic construct
  misc_feature 1..21: note = Synthetic construct
  source 1..21: mol_type = other DNA
ccggcgttacccactccgaag

SEQ ID NO: 16617 - DNA, 21 bp, synthetic construct
  misc_feature 1..21: note = Synthetic construct
  source 1..21: mol_type = other DNA
ccggcgttatccactccgaag

SEQ ID NO: 16618 - DNA, 21 bp, synthetic construct
  misc_feature 1..21: note = Synthetic construct
  source 1..21: mol_type = other DNA
ccggcgttagacactccgaag

SEQ ID NO: 16619 - DNA, 21 bp, synthetic construct
  misc_feature 1..21: note = Synthetic construct
  source 1..21: mol_type = other DNA
ccggcgttaggcactccgaag

SEQ ID NO: 16620 - DNA, 21 bp, synthetic construct
  misc_feature 1..21: note = Synthetic construct
  source 1..21: mol_type = other DNA
ccggcgttagtcactccgaag

SEQ ID NO: 16621 - DNA, 21 bp, synthetic construct
  misc_feature 1..21: note = Synthetic construct
  source 1..21: mol_type = other DNA
ccggcgttagcaactccgaag

SEQ ID NO: 16622 - DNA, 21 bp, synthetic construct
  misc_feature 1..21: note = Synthetic construct
  source 1..21: mol_type = other DNA
ccggcgttagcgactccgaag

SEQ ID NO: 16623 - DNA, 21 bp, synthetic construct
  misc_feature 1..21: note = Synthetic construct
  source 1..21: mol_type = other DNA
ccggcgttagctactccgaag

SEQ ID NO: 16624 - DNA, 21 bp, synthetic construct
  misc_feature 1..21: note = Synthetic construct
  source 1..21: mol_type = other DNA
ccggcgttagcccctccgaag

SEQ ID NO: 16625 - DNA, 21 bp, synthetic construct
  misc_feature 1..21: note = Synthetic construct
  source 1..21: mol_type = other DNA
ccggcgttagccgctccgaag

SEQ ID NO: 16626 - DNA, 21 bp, synthetic construct
  misc_feature 1..21: note = Synthetic construct
  source 1..21: mol_type = other DNA
ccggcgttagcctctccgaag

SEQ ID NO: 16627 - DNA, 21 bp, synthetic construct
  misc_feature 1..21: note = Synthetic construct
  source 1..21: mol_type = other DNA
ccggcgttagccaatccgaag

SEQ ID NO: 16628 - DNA, 21 bp, synthetic construct
  misc_feature 1..21: note = Synthetic construct
  source 1..21: mol_type = other DNA
ccggcgttagccagtccgaag

SEQ ID NO: 16629 - DNA, 21 bp, synthetic construct
  misc_feature 1..21: note = Synthetic construct
  source 1..21: mol_type = other DNA
ccggcgttagccattccgaag

SEQ ID NO: 16630 - DNA, 21 bp, synthetic construct
  misc_feature 1..21: note = Synthetic construct
  source 1..21: mol_type = other DNA
ccggcgttagccacaccgaag

SEQ ID NO: 16631 - DNA, 21 bp, synthetic construct
  misc_feature 1..21: note = Synthetic construct
  source 1..21: mol_type = other DNA
ccggcgttagccaccccgaag

SEQ ID NO: 16632 - DNA, 21 bp, synthetic construct
  misc_feature 1..21: note = Synthetic construct
  source 1..21: mol_type = other DNA
ccggcgttagccacgccgaag

SEQ ID NO: 16633 - DNA, 21 bp, synthetic construct
  misc_feature 1..21: note = Synthetic construct
  source 1..21: mol_type = other DNA
ccggcgttagccactacgaag

SEQ ID NO: 16634 - DNA, 21 bp, synthetic construct
  misc_feature 1..21: note = Synthetic construct
  source 1..21: mol_type = other DNA
ccggcgttagccactgcgaag

SEQ ID NO: 16635 - DNA, 21 bp, synthetic construct
  misc_feature 1..21: note = Synthetic construct
  source 1..21: mol_type = other DNA
ccggcgttagccacttcgaag

SEQ ID NO: 16636 - DNA, 21 bp, synthetic construct
  misc_feature 1..21: note = Synthetic construct
  source 1..21: mol_type = other DNA
ccggcgttagccactcagaag

SEQ ID NO: 16637 - DNA, 21 bp, synthetic construct
  misc_feature 1..21: note = Synthetic construct
  source 1..21: mol_type = other DNA
ccggcgttagccactcggaag

SEQ ID NO: 16638 - DNA, 21 bp, synthetic construct
  misc_feature 1..21: note = Synthetic construct
  source 1..21: mol_type = other DNA
ccggcgttagccactctgaag

SEQ ID NO: 16639 - DNA, 21 bp, synthetic construct
  misc_feature 1..21: note = Synthetic construct
  source 1..21: mol_type = other DNA
ccggcgttagccactccaaag

SEQ ID NO: 16640 - DNA, 21 bp, synthetic construct
  misc_feature 1..21: note = Synthetic construct
  source 1..21: mol_type = other DNA
ccggcgttagccactcccaag

SEQ ID NO: 16641 - DNA, 21 bp, synthetic construct
  misc_feature 1..21: note = Synthetic construct
  source 1..21: mol_type = other DNA
ccggcgttagccactcctaag

SEQ ID NO: 16642 - DNA, 21 bp, synthetic construct
  misc_feature 1..21: note = Synthetic construct
  source 1..21: mol_type = other DNA
ccggcgttagccactccgcag

SEQ ID NO: 16643 - DNA, 21 bp, synthetic construct
  misc_feature 1..21: note = Synthetic construct
  source 1..21: mol_type = other DNA
ccggcgttagccactccggag

SEQ ID NO: 16644 - DNA, 21 bp, synthetic construct
  misc_feature 1..21: note = Synthetic construct
  source 1..21: mol_type = other DNA
ccggcgttagccactccgtag

SEQ ID NO: 16645 - DNA, 21 bp, synthetic construct
  misc_feature 1..21: note = Synthetic construct
  source 1..21: mol_type = other DNA
ccggcgttagccactccgacg

SEQ ID NO: 16646 - DNA, 21 bp, synthetic construct
  misc_feature 1..21: note = Synthetic construct
  source 1..21: mol_type = other DNA
ccggcgttagccactccgagg

SEQ ID NO: 16647 - DNA, 21 bp, synthetic construct
  misc_feature 1..21: note = Synthetic construct
  source 1..21: mol_type = other DNA
ccggcgttagccactccgatg

SEQ ID NO: 16648 - DNA, 21 bp, synthetic construct
  misc_feature 1..21: note = Synthetic construct
  source 1..21: mol_type = other DNA
ccggcgttagccactccgaaa

SEQ ID NO: 16649 - DNA, 21 bp, synthetic construct
  misc_feature 1..21: note = Synthetic construct
  source 1..21: mol_type = other DNA
ccggcgttagccactccgaac

SEQ ID NO: 16650 - DNA, 21 bp, synthetic construct
  misc_feature 1..21: note = Synthetic construct
  source 1..21: mol_type = other DNA
ccggcgttagccactccgaat

SEQ ID NO: 16651 - DNA, 22 bp, synthetic construct
  misc_feature 1..22: note = Synthetic construct
  source 1..22: mol_type = other DNA
cgcgaggtccgtcccaccgaag

SEQ ID NO: 16652 - DNA, 22 bp, synthetic construct
  misc_feature 1..22: note = Synthetic construct
  source 1..22: mol_type = other DNA
ggcgaggtccgtcccaccgaag

SEQ ID NO: 16653 - DNA, 22 bp, synthetic construct
  misc_feature 1..22: note = Synthetic construct
  source 1..22: mol_type = other DNA
tgcgaggtccgtcccaccgaag

SEQ ID NO: 16654 - DNA, 22 bp, synthetic construct
  misc_feature 1..22: note = Synthetic construct
  source 1..22: mol_type = other DNA
aacgaggtccgtcccaccgaag

SEQ ID NO: 16655 - DNA, 22 bp, synthetic construct
  misc_feature 1..22: note = Synthetic construct
  source 1..22: mol_type = other DNA
accgaggtccgtcccaccgaag

SEQ ID NO: 16656 - DNA, 22 bp, synthetic construct
  misc_feature 1..22: note = Synthetic construct
  source 1..22: mol_type = other DNA
atcgaggtccgtcccaccgaag

SEQ ID NO: 16657 - DNA, 22 bp, synthetic construct
  misc_feature 1..22: note = Synthetic construct
  source 1..22: mol_type = other DNA
agagaggtccgtcccaccgaag

SEQ ID NO: 16658 - DNA, 22 bp, synthetic construct
  misc_feature 1..22: note = Synthetic construct
  source 1..22: mol_type = other DNA
agggaggtccgtcccaccgaag

SEQ ID NO: 16659 - DNA, 22 bp, synthetic construct
  misc_feature 1..22: note = Synthetic construct
  source 1..22: mol_type = other DNA
agtgaggtccgtcccaccgaag

SEQ ID NO: 16660 - DNA, 22 bp, synthetic construct
  misc_feature 1..22: note = Synthetic construct
  source 1..22: mol_type = other DNA
agcaaggtccgtcccaccgaag

SEQ ID NO: 16661 - DNA, 22 bp, synthetic construct
  misc_feature 1..22: note = Synthetic construct
  source 1..22: mol_type = other DNA
agccaggtccgtcccaccgaag

SEQ ID NO: 16662 - DNA, 22 bp, synthetic construct
  misc_feature 1..22: note = Synthetic construct
  source 1..22: mol_type = other DNA
agctaggtccgtcccaccgaag

SEQ ID NO: 16663 - DNA, 22 bp, synthetic construct
  misc_feature 1..22: note = Synthetic construct
  source 1..22: mol_type = other DNA
agcgcggtccgtcccaccgaag

SEQ ID NO: 16664 - DNA, 22 bp, synthetic construct
  misc_feature 1..22: note = Synthetic construct
  source 1..22: mol_type = other DNA
agcggggtccgtcccaccgaag

SEQ ID NO: 16665 - DNA, 22 bp, synthetic construct
  misc_feature 1..22: note = Synthetic construct
  source 1..22: mol_type = other DNA
agcgtggtccgtcccaccgaag

SEQ ID NO: 16666 - DNA, 22 bp, synthetic construct
  misc_feature 1..22: note = Synthetic construct
  source 1..22: mol_type = other DNA
agcgaagtccgtcccaccgaag

SEQ ID NO: 16667 - DNA, 22 bp, synthetic construct
  misc_feature 1..22: note = Synthetic construct
  source 1..22: mol_type = other DNA
agcgacgtccgtcccaccgaag

SEQ ID NO: 16668 - DNA, 22 bp, synthetic construct
  misc_feature 1..22: note = Synthetic construct
  source 1..22: mol_type = other DNA
agcgatgtccgtcccaccgaag

SEQ ID NO: 16669 - DNA, 22 bp, synthetic construct
  misc_feature 1..22: note = Synthetic construct
  source 1..22: mol_type = other DNA
agcgagatccgtcccaccgaag

SEQ ID NO: 16670 - DNA, 22 bp, synthetic construct
  misc_feature 1..22: note = Synthetic construct
  source 1..22: mol_type = other DNA
agcgagctccgtcccaccgaag

SEQ ID NO: 16671 - DNA, 22 bp, synthetic construct
  misc_feature 1..22: note = Synthetic construct
  source 1..22: mol_type = other DNA
agcgagttccgtcccaccgaag

SEQ ID NO: 16672 - DNA, 22 bp, synthetic construct
  misc_feature 1..22: note = Synthetic construct
  source 1..22: mol_type = other DNA
agcgaggaccgtcccaccgaag

SEQ ID NO: 16673 - DNA, 22 bp, synthetic construct
  misc_feature 1..22: note = Synthetic construct
  source 1..22: mol_type = other DNA
agcgaggcccgtcccaccgaag

SEQ ID NO: 16674 - DNA, 22 bp, synthetic construct
  misc_feature 1..22: note = Synthetic construct
  source 1..22: mol_type = other DNA
agcgagggccgtcccaccgaag

SEQ ID NO: 16675 - DNA, 22 bp, synthetic construct
  misc_feature 1..22: note = Synthetic construct
  source 1..22: mol_type = other DNA
agcgaggtacgtcccaccgaag

SEQ ID NO: 16676 - DNA, 22 bp, synthetic construct
  misc_feature 1..22: note = Synthetic construct
  source 1..22: mol_type = other DNA
agcgaggtgcgtcccaccgaag

SEQ ID NO: 16677 - DNA, 22 bp, synthetic construct
  misc_feature 1..22: note = Synthetic construct
  source 1..22: mol_type = other DNA
agcgaggttcgtcccaccgaag

SEQ ID NO: 16678 - DNA, 22 bp, synthetic construct
  misc_feature 1..22: note = Synthetic construct
  source 1..22: mol_type = other DNA
agcgaggtcagtcccaccgaag

SEQ ID NO: 16679 - DNA, 22 bp, synthetic construct
  misc_feature 1..22: note = Synthetic construct
  source 1..22: mol_type = other DNA
agcgaggtcggtcccaccgaag

SEQ ID NO: 16680 - DNA, 22 bp, synthetic construct
  misc_feature 1..22: note = Synthetic construct
  source 1..22: mol_type = other DNA
agcgaggtctgtcccaccgaag

SEQ ID NO: 16681 - DNA, 22 bp, synthetic construct
  misc_feature 1..22: note = Synthetic construct
  source 1..22: mol_type = other DNA
agcgaggtccatcccaccgaag

SEQ ID NO: 16682 - DNA, 22 bp, synthetic construct
  misc_feature 1..22: note = Synthetic construct
  source 1..22: mol_type = other DNA
agcgaggtccctcccaccgaag

SEQ ID NO: 16683 - DNA, 22 bp, synthetic construct
  misc_feature 1..22: note = Synthetic construct
  source 1..22: mol_type = other DNA
agcgaggtccttcccaccgaag

SEQ ID NO: 16684 - DNA, 22 bp, synthetic construct
  misc_feature 1..22: note = Synthetic construct
  source 1..22: mol_type = other DNA
agcgaggtccgacccaccgaag

SEQ ID NO: 16685 - DNA, 22 bp, synthetic construct
  misc_feature 1..22: note = Synthetic construct
  source 1..22: mol_type = other DNA
agcgaggtccgccccaccgaag

SEQ ID NO: 16686 - DNA, 22 bp, synthetic construct
  misc_feature 1..22: note = Synthetic construct
  source 1..22: mol_type = other DNA
agcgaggtccggcccaccgaag

SEQ ID NO: 16687 - DNA, 22 bp, synthetic construct
  misc_feature 1..22: note = Synthetic construct
  source 1..22: mol_type = other DNA
agcgaggtccgtaccaccgaag

SEQ ID NO: 16688 - DNA, 22 bp, synthetic construct
  misc_feature 1..22: note = Synthetic construct
  source 1..22: mol_type = other DNA
agcgaggtccgtgccaccgaag

SEQ ID NO: 16689 - DNA, 22 bp, synthetic construct
  misc_feature 1..22: note = Synthetic construct
  source 1..22: mol_type = other DNA
agcgaggtccgttccaccgaag

SEQ ID NO: 16690 - DNA, 22 bp, synthetic construct
  misc_feature 1..22: note = Synthetic construct
  source 1..22: mol_type = other DNA
agcgaggtccgtcacaccgaag

SEQ ID NO: 16691 - DNA, 22 bp, synthetic construct
  misc_feature 1..22: note = Synthetic construct
  source 1..22: mol_type = other DNA
agcgaggtccgtcgcaccgaag

SEQ ID NO: 16692 - DNA, 22 bp, synthetic construct
  misc_feature 1..22: note = Synthetic construct
  source 1..22: mol_type = other DNA
agcgaggtccgtctcaccgaag

SEQ ID NO: 16693 - DNA, 22 bp, synthetic construct
  misc_feature 1..22: note = Synthetic construct
  source 1..22: mol_type = other DNA
agcgaggtccgtccaaccgaag

SEQ ID NO: 16694 - DNA, 22 bp, synthetic construct
  misc_feature 1..22: note = Synthetic construct
  source 1..22: mol_type = other DNA
agcgaggtccgtccgaccgaag

SEQ ID NO: 16695 - DNA, 22 bp, synthetic construct
  misc_feature 1..22: note = Synthetic construct
  source 1..22: mol_type = other DNA
agcgaggtccgtcctaccgaag

SEQ ID NO: 16696 - DNA, 22 bp, synthetic construct
  misc_feature 1..22: note = Synthetic construct
  source 1..22: mol_type = other DNA
agcgaggtccgtccccccgaag

SEQ ID NO: 16697 - DNA, 22 bp, synthetic construct
  misc_feature 1..22: note = Synthetic construct
  source 1..22: mol_type = other DNA
agcgaggtccgtcccgccgaag

SEQ ID NO: 16698 - DNA, 22 bp, synthetic construct
  misc_feature 1..22: note = Synthetic construct
  source 1..22: mol_type = other DNA
agcgaggtccgtccctccgaag

SEQ ID NO: 16699 - DNA, 22 bp, synthetic construct
  misc_feature 1..22: note = Synthetic construct
  source 1..22: mol_type = other DNA
agcgaggtccgtcccaacgaag

SEQ ID NO: 16700 - DNA, 22 bp, synthetic construct
  misc_feature 1..22: note = Synthetic construct
  source 1..22: mol_type = other DNA
agcgaggtccgtcccagcgaag

SEQ ID NO: 16701 - DNA, 22 bp, synthetic construct
  misc_feature 1..22: note = Synthetic construct
  source 1..22: mol_type = other DNA
agcgaggtccgtcccatcgaag

SEQ ID NO: 16702 - DNA, 22 bp, synthetic construct
  misc_feature 1..22: note = Synthetic construct
  source 1..22: mol_type = other DNA
agcgaggtccgtcccacagaag

SEQ ID NO: 16703 - DNA, 22 bp, synthetic construct
  misc_feature 1..22: note = Synthetic construct
  source 1..22: mol_type = other DNA
agcgaggtccgtcccacggaag

SEQ ID NO: 16704 - DNA, 22 bp, synthetic construct
  misc_feature 1..22: note = Synthetic construct
  source 1..22: mol_type = other DNA
agcgaggtccgtcccactgaag

SEQ ID NO: 16705 - DNA, 22 bp, synthetic construct
  misc_feature 1..22: note = Synthetic construct
  source 1..22: mol_type = other DNA
agcgaggtccgtcccaccaaag

SEQ ID NO: 16706 - DNA, 22 bp, synthetic construct
  misc_feature 1..22: note = Synthetic construct
  source 1..22: mol_type = other DNA
agcgaggtccgtcccacccaag

SEQ ID NO: 16707 - DNA, 22 bp, synthetic construct
  misc_feature 1..22: note = Synthetic construct
  source 1..22: mol_type = other DNA
agcgaggtccgtcccacctaag

SEQ ID NO: 16708 - DNA, 22 bp, synthetic construct
  misc_feature 1..22: note = Synthetic construct
  source 1..22: mol_type = other DNA
agcgaggtccgtcccaccgcag

SEQ ID NO: 16709 - DNA, 22 bp, synthetic construct
  misc_feature 1..22: note = Synthetic construct
  source 1..22: mol_type = other DNA
agcgaggtccgtcccaccggag

SEQ ID NO: 16710 - DNA, 22 bp, synthetic construct
  misc_feature 1..22: note = Synthetic construct
  source 1..22: mol_type = other DNA
agcgaggtccgtcccaccgtag

SEQ ID NO: 16711 - DNA, 22 bp, synthetic construct
  misc_feature 1..22: note = Synthetic construct
  source 1..22: mol_type = other DNA
agcgaggtccgtcccaccgacg

SEQ ID NO: 16712 - DNA, 22 bp, synthetic construct
  misc_feature 1..22: note = Synthetic construct
  source 1..22: mol_type = other DNA
agcgaggtccgtcccaccgagg

SEQ ID NO: 16713 - DNA, 22 bp, synthetic construct
  misc_feature 1..22: note = Synthetic construct
  source 1..22: mol_type = other DNA
agcgaggtccgtcccaccgatg

SEQ ID NO: 16714 - DNA, 22 bp, synthetic construct
  misc_feature 1..22: note = Synthetic construct
  source 1..22: mol_type = other DNA
agcgaggtccgtcccaccgaaa

SEQ ID NO: 16715 - DNA, 22 bp, synthetic construct
  misc_feature 1..22: note = Synthetic construct
  source 1..22: mol_type = other DNA
agcgaggtccgtcccaccgaac

SEQ ID NO: 16716 - DNA, 22 bp, synthetic construct
  misc_feature 1..22: note = Synthetic construct
  source 1..22: mol_type = other DNA
agcgaggtccgtcccaccgaat

SEQ ID NO: 16717 - DNA, 20 bp, synthetic construct
  misc_feature 1..20: note = Synthetic construct
  source 1..20: mol_type = other DNA
aggattgtacccctcgatgc

SEQ ID NO: 16718 - DNA, 20 bp, synthetic construct
  misc_feature 1..20: note = Synthetic construct
  source 1..20: mol_type = other DNA
gggattgtacccctcgatgc

SEQ ID NO: 16719 - DNA, 20 bp, synthetic construct
  misc_feature 1..20: note = Synthetic construct
  source 1..20: mol_type = other DNA
tggattgtacccctcgatgc

SEQ ID NO: 16720 - DNA, 20 bp, synthetic construct
  misc_feature 1..20: note = Synthetic construct
  source 1..20: mol_type = other DNA
cagattgtacccctcgatgc

SEQ ID NO: 16721 - DNA, 20 bp, synthetic construct
  misc_feature 1..20: note = Synthetic construct
  source 1..20: mol_type = other DNA
ccgattgtacccctcgatgc

SEQ ID NO: 16722 - DNA, 20 bp, synthetic construct
  misc_feature 1..20: note = Synthetic construct
  source 1..20: mol_type = other DNA
ctgattgtacccctcgatgc

SEQ ID NO: 16723 - DNA, 20 bp, synthetic construct
  misc_feature 1..20: note = Synthetic construct
  source 1..20: mol_type = other DNA
cgaattgtacccctcgatgc

SEQ ID NO: 16724 - DNA, 20 bp, synthetic construct
  misc_feature 1..20: note = Synthetic construct
  source 1..20: mol_type = other DNA
cgcattgtacccctcgatgc

SEQ ID NO: 16725 - DNA, 20 bp, synthetic construct
  misc_feature 1..20: note = Synthetic construct
  source 1..20: mol_type = other DNA
cgtattgtacccctcgatgc

SEQ ID NO: 16726 - DNA, 20 bp, synthetic construct
  misc_feature 1..20: note = Synthetic construct
  source 1..20: mol_type = other DNA
cggcttgtacccctcgatgc

SEQ ID NO: 16727 - DNA, 20 bp, synthetic construct
  misc_feature 1..20: note = Synthetic construct
  source 1..20: mol_type = other DNA
cgggttgtacccctcgatgc

SEQ ID NO: 16728 - DNA, 20 bp, synthetic construct
  misc_feature 1..20: note = Synthetic construct
  source 1..20: mol_type = other DNA
cggtttgtacccctcgatgc

SEQ ID NO: 16729 - DNA, 20 bp, synthetic construct
  misc_feature 1..20: note = Synthetic construct
  source 1..20: mol_type = other DNA
cggaatgtacccctcgatgc

SEQ ID NO: 16730 - DNA, 20 bp, synthetic construct
  misc_feature 1..20: note = Synthetic construct
  source 1..20: mol_type = other DNA
cggactgtacccctcgatgc

SEQ ID NO: 16731 - DNA, 20 bp, synthetic construct
  misc_feature 1..20: note = Synthetic construct
  source 1..20: mol_type = other DNA
cggagtgtacccctcgatgc

SEQ ID NO: 16732 - DNA, 20 bp, synthetic construct
  misc_feature 1..20: note = Synthetic construct
  source 1..20: mol_type = other DNA
cggatagtacccctcgatgc

SEQ ID NO: 16733 - DNA, 20 bp, synthetic construct
  misc_feature 1..20: note = Synthetic construct
  source 1..20: mol_type = other DNA
cggatcgtacccctcgatgc

SEQ ID NO: 16734 - DNA, 20 bp, synthetic construct
  misc_feature 1..20: note = Synthetic construct
  source 1..20: mol_type = other DNA
cggatggtacccctcgatgc

SEQ ID NO: 16735 - DNA, 20 bp, synthetic construct
  misc_feature 1..20: note = Synthetic construct
  source 1..20: mol_type = other DNA
cggattatacccctcgatgc

SEQ ID NO: 16736 - DNA, 20 bp, synthetic construct
  misc_feature 1..20: note = Synthetic construct
  source 1..20: mol_type = other DNA
cggattctacccctcgatgc

SEQ ID NO: 16737 - DNA, 20 bp, synthetic construct
  misc_feature 1..20: note = Synthetic construct
  source 1..20: mol_type = other DNA
cggattttacccctcgatgc

SEQ ID NO: 16738 - DNA, 20 bp, synthetic construct
  misc_feature 1..20: note = Synthetic construct
  source 1..20: mol_type = other DNA
cggattgaacccctcgatgc

SEQ ID NO: 16739 - DNA, 20 bp, synthetic construct
  misc_feature 1..20: note = Synthetic construct
  source 1..20: mol_type = other DNA
cggattgcacccctcgatgc

SEQ ID NO: 16740 - DNA, 20 bp, synthetic construct
  misc_feature 1..20: note = Synthetic construct
  source 1..20: mol_type = other DNA
cggattggacccctcgatgc

SEQ ID NO: 16741 - DNA, 20 bp, synthetic construct
  misc_feature 1..20: note = Synthetic construct
  source 1..20: mol_type = other DNA
cggattgtccccctcgatgc

SEQ ID NO: 16742 - DNA, 20 bp, synthetic construct
  misc_feature 1..20: note = Synthetic construct
  source 1..20: mol_type = other DNA
cggattgtgcccctcgatgc

SEQ ID NO: 16743 - DNA, 20 bp, synthetic construct
  misc_feature 1..20: note = Synthetic construct
  source 1..20: mol_type = other DNA
cggattgttcccctcgatgc

SEQ ID NO: 16744 - DNA, 20 bp, synthetic construct
  misc_feature 1..20: note = Synthetic construct
  source 1..20: mol_type = other DNA
cggattgtaaccctcgatgc

SEQ ID NO: 16745 - DNA, 20 bp, synthetic construct
  misc_feature 1..20: note = Synthetic construct
  source 1..20: mol_type = other DNA
cggattgtagccctcgatgc

SEQ ID NO: 16746 - DNA, 20 bp, synthetic construct
  misc_feature 1..20: note = Synthetic construct
  source 1..20: mol_type = other DNA
cggattgtatccctcgatgc

SEQ ID NO: 16747 - DNA, 20 bp, synthetic construct
  misc_feature 1..20: note = Synthetic construct
  source 1..20: mol_type = other DNA
cggattgtacacctcgatgc

SEQ ID NO: 16748 - DNA, 20 bp, synthetic construct
  misc_feature 1..20: note = Synthetic construct
  source 1..20: mol_type = other DNA
cggattgtacgcctcgatgc

SEQ ID NO: 16749 - DNA, 20 bp, synthetic construct
  misc_feature 1..20: note = Synthetic construct
  source 1..20: mol_type = other DNA
cggattgtactcctcgatgc

SEQ ID NO: 16750 - DNA, 20 bp, synthetic construct
  misc_feature 1..20: note = Synthetic construct
  source 1..20: mol_type = other DNA
cggattgtaccactcgatgc

SEQ ID NO: 16751 - DNA, 20 bp, synthetic construct
  misc_feature 1..20: note = Synthetic construct
  source 1..20: mol_type = other DNA
cggattgtaccgctcgatgc

SEQ ID NO: 16752 - DNA, 20 bp, synthetic construct
  misc_feature 1..20: note = Synthetic construct
  source 1..20: mol_type = other DNA
cggattgtacctctcgatgc

SEQ ID NO: 16753 - DNA, 20 bp, synthetic construct
  misc_feature 1..20: note = Synthetic construct
  source 1..20: mol_type = other DNA
cggattgtacccatcgatgc

SEQ ID NO: 16754 - DNA, 20 bp, synthetic construct
  misc_feature 1..20: note = Synthetic construct
  source 1..20: mol_type = other DNA
cggattgtacccgtcgatgc

SEQ ID NO: 16755 - DNA, 20 bp, synthetic construct
  misc_feature 1..20: note = Synthetic construct
  source 1..20: mol_type = other DNA
cggattgtacccttcgatgc

SEQ ID NO: 16756 - DNA, 20 bp, synthetic construct
  misc_feature 1..20: note = Synthetic construct
  source 1..20: mol_type = other DNA
cggattgtaccccacgatgc

SEQ ID NO: 16757 - DNA, 20 bp, synthetic construct
  misc_feature 1..20: note = Synthetic construct
  source 1..20: mol_type = other DNA
cggattgtaccccccgatgc

SEQ ID NO: 16758 - DNA, 20 bp, synthetic construct
  misc_feature 1..20: note = Synthetic construct
  source 1..20: mol_type = other DNA
cggattgtaccccgcgatgc

SEQ ID NO: 16759 - DNA, 20 bp, synthetic construct
  misc_feature 1..20: note = Synthetic construct
  source 1..20: mol_type = other DNA
cggattgtacccctagatgc

SEQ ID NO: 16760 - DNA, 20 bp, synthetic construct
  misc_feature 1..20: note = Synthetic construct
  source 1..20: mol_type = other DNA
cggattgtacccctggatgc

SEQ ID NO: 16761 - DNA, 20 bp, synthetic construct
  misc_feature 1..20: note = Synthetic construct
  source 1..20: mol_type = other DNA
cggattgtaccccttgatgc

SEQ ID NO: 16762 - DNA, 20 bp, synthetic construct
  misc_feature 1..20: note = Synthetic construct
  source 1..20: mol_type = other DNA
cggattgtacccctcaatgc

SEQ ID NO: 16763 - DNA, 20 bp, synthetic construct
  misc_feature 1..20: note = Synthetic construct
  source 1..20: mol_type = other DNA
cggattgtacccctccatgc

SEQ ID NO: 16764 - DNA, 20 bp, synthetic construct
  misc_feature 1..20: note = Synthetic construct
  source 1..20: mol_type = other DNA
cggattgtacccctctatgc

SEQ ID NO: 16765 - DNA, 20 bp, synthetic construct
  misc_feature 1..20: note = Synthetic construct
  source 1..20: mol_type = other DNA
cggattgtacccctcgctgc

SEQ ID NO: 16766 - DNA, 20 bp, synthetic construct
  misc_feature 1..20: note = Synthetic construct
  source 1..20: mol_type = other DNA
cggattgtacccctcggtgc

SEQ ID NO: 16767 - DNA, 20 bp, synthetic construct
  misc_feature 1..20: note = Synthetic construct
  source 1..20: mol_type = other DNA
cggattgtacccctcgttgc

SEQ ID NO: 16768 - DNA, 20 bp, synthetic construct
  misc_feature 1..20: note = Synthetic construct
  source 1..20: mol_type = other DNA
cggattgtacccctcgaagc

SEQ ID NO: 16769 - DNA, 20 bp, synthetic construct
  misc_feature 1..20: note = Synthetic construct
  source 1..20: mol_type = other DNA
cggattgtacccctcgacgc

SEQ ID NO: 16770 - DNA, 20 bp, synthetic construct
  misc_feature 1..20: note = Synthetic construct
  source 1..20: mol_type = other DNA
cggattgtacccctcgaggc

SEQ ID NO: 16771 - DNA, 20 bp, synthetic construct
  misc_feature 1..20: note = Synthetic construct
  source 1..20: mol_type = other DNA
cggattgtacccctcgatac

SEQ ID NO: 16772 - DNA, 20 bp, synthetic construct
  misc_feature 1..20: note = Synthetic construct
  source 1..20: mol_type = other DNA
cggattgtacccctcgatcc

SEQ ID NO: 16773 - DNA, 20 bp, synthetic construct
  misc_feature 1..20: note = Synthetic construct
  source 1..20: mol_type = other DNA
cggattgtacccctcgattc

SEQ ID NO: 16774 - DNA, 20 bp, synthetic construct
  misc_feature 1..20: note = Synthetic construct
  source 1..20: mol_type = other DNA
cggattgtacccctcgatga

SEQ ID NO: 16775 - DNA, 20 bp, synthetic construct
  misc_feature 1..20: note = Synthetic construct
  source 1..20: mol_type = other DNA
cggattgtacccctcgatgg

SEQ ID NO: 16776 - DNA, 20 bp, synthetic construct
  misc_feature 1..20: note = Synthetic construct
  source 1..20: mol_type = other DNA
cggattgtacccctcgatgt

SEQ ID NO: 16777 - DNA, 23 bp, synthetic construct
  misc_feature 1..23: note = Synthetic construct
  source 1..23: mol_type = other DNA
atcggtgatttcacctccagtat

SEQ ID NO: 16778 - DNA, 23 bp, synthetic construct
  misc_feature 1..23: note = Synthetic construct
  source 1..23: mol_type = other DNA
ctcggtgatttcacctccagtat

SEQ ID NO: 16779 - DNA, 23 bp, synthetic construct
  misc_feature 1..23: note = Synthetic construct
  source 1..23: mol_type = other DNA
ttcggtgatttcacctccagtat

SEQ ID NO: 16780 - DNA, 23 bp, synthetic construct
  misc_feature 1..23: note = Synthetic construct
  source 1..23: mol_type = other DNA
gacggtgatttcacctccagtat

SEQ ID NO: 16781 - DNA, 23 bp, synthetic construct
  misc_feature 1..23: note = Synthetic construct
  source 1..23: mol_type = other DNA
gccggtgatttcacctccagtat

SEQ ID NO: 16782 - DNA, 23 bp, synthetic construct
  misc_feature 1..23: note = Synthetic construct
  source 1..23: mol_type = other DNA
ggcggtgatttcacctccagtat

SEQ ID NO: 16783 - DNA, 23 bp, synthetic construct
  misc_feature 1..23: note = Synthetic construct
  source 1..23: mol_type = other DNA
gtaggtgatttcacctccagtat

SEQ ID NO: 16784 - DNA, 23 bp, synthetic construct
  misc_feature 1..23: note = Synthetic construct
  source 1..23: mol_type = other DNA
gtgggtgatttcacctccagtat

SEQ ID NO: 16785 - DNA, 23 bp, synthetic construct
  misc_feature 1..23: note = Synthetic construct
  source 1..23: mol_type = other DNA
gttggtgatttcacctccagtat

SEQ ID NO: 16786 - DNA, 23 bp, synthetic construct
  misc_feature 1..23: note = Synthetic construct
  source 1..23: mol_type = other DNA
gtcagtgatttcacctccagtat

SEQ ID NO: 16787 - DNA, 23 bp, synthetic construct
  misc_feature 1..23: note = Synthetic construct
  source 1..23: mol_type = other DNA
gtccgtgatttcacctccagtat

SEQ ID NO: 16788 - DNA, 23 bp, synthetic construct
  misc_feature 1..23: note = Synthetic construct
  source 1..23: mol_type = other DNA
gtctgtgatttcacctccagtat

SEQ ID NO: 16789 - DNA, 23 bp, synthetic construct
  misc_feature 1..23: note = Synthetic construct
  source 1..23: mol_type = other DNA
gtcgatgatttcacctccagtat

SEQ ID NO: 16790 - DNA, 23 bp, synthetic construct
  misc_feature 1..23: note = Synthetic construct
  source 1..23: mol_type = other DNA
gtcgctgatttcacctccagtat

SEQ ID NO: 16791 - DNA, 23 bp, synthetic construct
  misc_feature 1..23: note = Synthetic construct
  source 1..23: mol_type = other DNA
gtcgttgatttcacctccagtat

SEQ ID NO: 16792 - DNA, 23 bp, synthetic construct
  misc_feature 1..23: note = Synthetic construct
  source 1..23: mol_type = other DNA
gtcggagatttcacctccagtat

SEQ ID NO: 16793 - DNA, 23 bp, synthetic construct
  misc_feature 1..23: note = Synthetic construct
  source 1..23: mol_type = other DNA
gtcggcgatttcacctccagtat

SEQ ID NO: 16794 - DNA, 23 bp, synthetic construct
  misc_feature 1..23: note = Synthetic construct
  source 1..23: mol_type = other DNA
gtcggggatttcacctccagtat

SEQ ID NO: 16795 - DNA, 23 bp, synthetic construct
  misc_feature 1..23: note = Synthetic construct
  source 1..23: mol_type = other DNA
gtcggtaatttcacctccagtat

SEQ ID NO: 16796 - DNA, 23 bp, synthetic construct
  misc_feature 1..23: note = Synthetic construct
  source 1..23: mol_type = other DNA
gtcggtcatttcacctccagtat

SEQ ID NO: 16797 - DNA, 23 bp, synthetic construct
  misc_feature 1..23: note = Synthetic construct
  source 1..23: mol_type = other DNA
gtcggttatttcacctccagtat

SEQ ID NO: 16798 - DNA, 23 bp, synthetic construct
  misc_feature 1..23: note = Synthetic construct
  source 1..23: mol_type = other DNA
gtcggtgctttcacctccagtat

SEQ ID NO: 16799 - DNA, 23 bp, synthetic construct
  misc_feature 1..23: note = Synthetic construct
  source 1..23: mol_type = other DNA
gtcggtggtttcacctccagtat

SEQ ID NO: 16800 - DNA, 23 bp, synthetic construct
  misc_feature 1..23: note = Synthetic construct
  source 1..23: mol_type = other DNA
gtcggtgttttcacctccagtat

SEQ ID NO: 16801 - DNA, 23 bp, synthetic construct
  misc_feature 1..23: note = Synthetic construct
  source 1..23: mol_type = other DNA
gtcggtgaattcacctccagtat

SEQ ID NO: 16802 - DNA, 23 bp, synthetic construct
  misc_feature 1..23: note = Synthetic construct
  source 1..23: mol_type = other DNA
gtcggtgacttcacctccagtat

SEQ ID NO: 16803 - DNA, 23 bp, synthetic construct
  misc_feature 1..23: note = Synthetic construct
  source 1..23: mol_type = other DNA
gtcggtgagttcacctccagtat

SEQ ID NO: 16804 - DNA, 23 bp, synthetic construct
  misc_feature 1..23: note = Synthetic construct
  source 1..23: mol_type = other DNA
gtcggtgatatcacctccagtat

SEQ ID NO: 16805 - DNA, 23 bp, synthetic construct
  misc_feature 1..23: note = Synthetic construct
  source 1..23: mol_type = other DNA
gtcggtgatctcacctccagtat

SEQ ID NO: 16806 - DNA, 23 bp, synthetic construct
  misc_feature 1..23: note = Synthetic construct
  source 1..23: mol_type = other DNA
gtcggtgatgtcacctccagtat

SEQ ID NO: 16807 - DNA, 23 bp, synthetic construct
  misc_feature 1..23: note = Synthetic construct
  source 1..23: mol_type = other DNA
gtcggtgattacacctccagtat

SEQ ID NO: 16808 - DNA, 23 bp, synthetic construct
  misc_feature 1..23: note = Synthetic construct
  source 1..23: mol_type = other DNA
gtcggtgattccacctccagtat

SEQ ID NO: 16809 - DNA, 23 bp, synthetic construct
  misc_feature 1..23: note = Synthetic construct
  source 1..23: mol_type = other DNA
gtcggtgattgcacctccagtat

SEQ ID NO: 16810 - DNA, 23 bp, synthetic construct
  misc_feature 1..23: note = Synthetic construct
  source 1..23: mol_type = other DNA
gtcggtgatttaacctccagtat

SEQ ID NO: 16811 - DNA, 23 bp, synthetic construct
  misc_feature 1..23: note = Synthetic construct
  source 1..23: mol_type = other DNA
gtcggtgatttgacctccagtat

SEQ ID NO: 16812 - DNA, 23 bp, synthetic construct
  misc_feature 1..23: note = Synthetic construct
  source 1..23: mol_type = other DNA
gtcggtgattttacctccagtat

SEQ ID NO: 16813 - DNA, 23 bp, synthetic construct
  misc_feature 1..23: note = Synthetic construct
  source 1..23: mol_type = other DNA
gtcggtgatttcccctccagtat

SEQ ID NO: 16814 - DNA, 23 bp, synthetic construct
  misc_feature 1..23: note = Synthetic construct
  source 1..23: mol_type = other DNA
gtcggtgatttcgcctccagtat

SEQ ID NO: 16815 - DNA, 23 bp, synthetic construct
  misc_feature 1..23: note = Synthetic construct
  source 1..23: mol_type = other DNA
gtcggtgatttctcctccagtat

SEQ ID NO: 16816 - DNA, 23 bp, synthetic construct
  misc_feature 1..23: note = Synthetic construct
  source 1..23: mol_type = other DNA
gtcggtgatttcaactccagtat

SEQ ID NO: 16817 - DNA, 23 bp, synthetic construct
  misc_feature 1..23: note = Synthetic construct
  source 1..23: mol_type = other DNA
gtcggtgatttcagctccagtat

SEQ ID NO: 16818 - DNA, 23 bp, synthetic construct
  misc_feature 1..23: note = Synthetic construct
  source 1..23: mol_type = other DNA
gtcggtgatttcatctccagtat

SEQ ID NO: 16819 - DNA, 23 bp, synthetic construct
  misc_feature 1..23: note = Synthetic construct
  source 1..23: mol_type = other DNA
gtcggtgatttcacatccagtat

SEQ ID NO: 16820 - DNA, 23 bp, synthetic construct
  misc_feature 1..23: note = Synthetic construct
  source 1..23: mol_type = other DNA
gtcggtgatttcacgtccagtat

SEQ ID NO: 16821 - DNA, 23 bp, synthetic construct
  misc_feature 1..23: note = Synthetic construct
  source 1..23: mol_type = other DNA
gtcggtgatttcacttccagtat

SEQ ID NO: 16822 - DNA, 23 bp, synthetic construct
  misc_feature 1..23: note = Synthetic construct
  source 1..23: mol_type = other DNA
gtcggtgatttcaccaccagtat

SEQ ID NO: 16823 - DNA, 23 bp, synthetic construct
  misc_feature 1..23: note = Synthetic construct
  source 1..23: mol_type = other DNA
gtcggtgatttcacccccagtat

SEQ ID NO: 16824 - DNA, 23 bp, synthetic construct
  misc_feature 1..23: note = Synthetic construct
  source 1..23: mol_type = other DNA
gtcggtgatttcaccgccagtat

SEQ ID NO: 16825 - DNA, 23 bp, synthetic construct
  misc_feature 1..23: note = Synthetic construct
  source 1..23: mol_type = other DNA
gtcggtgatttcacctacagtat

SEQ ID NO: 16826 - DNA, 23 bp, synthetic construct
  misc_feature 1..23: note = Synthetic construct
  source 1..23: mol_type = other DNA
gtcggtgatttcacctgcagtat

SEQ ID NO: 16827 - DNA, 23 bp, synthetic construct
  misc_feature 1..23: note = Synthetic construct
  source 1..23: mol_type = other DNA
gtcggtgatttcaccttcagtat

SEQ ID NO: 16828 - DNA, 23 bp, synthetic construct
  misc_feature 1..23: note = Synthetic construct
  source 1..23: mol_type = other DNA
gtcggtgatttcacctcaagtat

SEQ ID NO: 16829 - DNA, 23 bp, synthetic construct
  misc_feature 1..23: note = Synthetic construct
  source 1..23: mol_type = other DNA
gtcggtgatttcacctcgagtat

SEQ ID NO: 16830 - DNA, 23 bp, synthetic construct
  misc_feature 1..23: note = Synthetic construct
  source 1..23: mol_type = other DNA
gtcggtgatttcacctctagtat

SEQ ID NO: 16831 - DNA, 23 bp, synthetic construct
  misc_feature 1..23: note = Synthetic construct
  source 1..23: mol_type = other DNA
gtcggtgatttcacctcccgtat

SEQ ID NO: 16832 - DNA, 23 bp, synthetic construct
  misc_feature 1..23: note = Synthetic construct
  source 1..23: mol_type = other DNA
gtcggtgatttcacctccggtat

SEQ ID NO: 16833 - DNA, 23 bp, synthetic construct
  misc_feature 1..23: note = Synthetic construct
  source 1..23: mol_type = other DNA
gtcggtgatttcacctcctgtat

SEQ ID NO: 16834 - DNA, 23 bp, synthetic construct
  misc_feature 1..23: note = Synthetic construct
  source 1..23: mol_type = other DNA
gtcggtgatttcacctccaatat

SEQ ID NO: 16835 - DNA, 23 bp, synthetic construct
  misc_feature 1..23: note = Synthetic construct
  source 1..23: mol_type = other DNA
gtcggtgatttcacctccactat

SEQ ID NO: 16836 - DNA, 23 bp, synthetic construct
  misc_feature 1..23: note = Synthetic construct
  source 1..23: mol_type = other DNA
gtcggtgatttcacctccattat

SEQ ID NO: 16837 - DNA, 23 bp, synthetic construct
  misc_feature 1..23: note = Synthetic construct
  source 1..23: mol_type = other DNA
gtcggtgatttcacctccagaat

SEQ ID NO: 16838 - DNA, 23 bp, synthetic construct
  misc_feature 1..23: note = Synthetic construct
  source 1..23: mol_type = other DNA
gtcggtgatttcacctccagcat

SEQ ID NO: 16839 - DNA, 23 bp, synthetic construct
  misc_feature 1..23: note = Synthetic construct
  source 1..23: mol_type = other DNA
gtcggtgatttcacctccaggat

SEQ ID NO: 16840 - DNA, 23 bp, synthetic construct
  misc_feature 1..23: note = Synthetic construct
  source 1..23: mol_type = other DNA
gtcggtgatttcacctccagtct

SEQ ID NO: 16841 - DNA, 23 bp, synthetic construct
  misc_feature 1..23: note = Synthetic construct
  source 1..23: mol_type = other DNA
gtcggtgatttcacctccagtgt

SEQ ID NO: 16842 - DNA, 23 bp, synthetic construct
  misc_feature 1..23: note = Synthetic construct
  source 1..23: mol_type = other DNA
gtcggtgatttcacctccagttt

SEQ ID NO: 16843 - DNA, 23 bp, synthetic construct
  misc_feature 1..23: note = Synthetic construct
  source 1..23: mol_type = other DNA
gtcggtgatttcacctccagtaa

SEQ ID NO: 16844 - DNA, 23 bp, synthetic construct
  misc_feature 1..23: note = Synthetic construct
  source 1..23: mol_type = other DNA
gtcggtgatttcacctccagtac

SEQ ID NO: 16845 - DNA, 23 bp, synthetic construct
  misc_feature 1..23: note = Synthetic construct
  source 1..23: mol_type = other DNA
gtcggtgatttcacctccagtag

SEQ ID NO: 16846 - DNA, 20 bp, synthetic construct
  misc_feature 1..20: note = Synthetic construct
  source 1..20: mol_type = other DNA
acacgatgacccacttcgct

SEQ ID NO: 16847 - DNA, 20 bp, synthetic construct
  misc_feature 1..20: note = Synthetic construct
  source 1..20: mol_type = other DNA
gcacgatgacccacttcgct

SEQ ID NO: 16848 - DNA, 20 bp, synthetic construct
  misc_feature 1..20: note = Synthetic construct
  source 1..20: mol_type = other DNA
tcacgatgacccacttcgct

SEQ ID NO: 16849 - DNA, 20 bp, synthetic construct
  misc_feature 1..20: note = Synthetic construct
  source 1..20: mol_type = other DNA
caacgatgacccacttcgct

SEQ ID NO: 16850 - DNA, 20 bp, synthetic construct
  misc_feature 1..20: note = Synthetic construct
  source 1..20: mol_type = other DNA
cgacgatgacccacttcgct

SEQ ID NO: 16851 - DNA, 20 bp, synthetic construct
  misc_feature 1..20: note = Synthetic construct
  source 1..20: mol_type = other DNA
ctacgatgacccacttcgct

SEQ ID NO: 16852 - DNA, 20 bp, synthetic construct
  misc_feature 1..20: note = Synthetic construct
  source 1..20: mol_type = other DNA
ccccgatgacccacttcgct

SEQ ID NO: 16853 - DNA, 20 bp, synthetic construct
  misc_feature 1..20: note = Synthetic construct
  source 1..20: mol_type = other DNA
ccgcgatgacccacttcgct

SEQ ID NO: 16854 - DNA, 20 bp, synthetic construct
  misc_feature 1..20: note = Synthetic construct
  source 1..20: mol_type = other DNA
cctcgatgacccacttcgct

SEQ ID NO: 16855 - DNA, 20 bp, synthetic construct
  misc_feature 1..20: note = Synthetic construct
  source 1..20: mol_type = other DNA
ccaagatgacccacttcgct

SEQ ID NO: 16856 - DNA, 20 bp, synthetic construct
  misc_feature 1..20: note = Synthetic construct
  source 1..20: mol_type = other DNA
ccaggatgacccacttcgct

SEQ ID NO: 16857 - DNA, 20 bp, synthetic construct
  misc_feature 1..20: note = Synthetic construct
  source 1..20: mol_type = other DNA
ccatgatgacccacttcgct

SEQ ID NO: 16858 - DNA, 20 bp, synthetic construct
  misc_feature 1..20: note = Synthetic construct
  source 1..20: mol_type = other DNA
ccacaatgacccacttcgct

SEQ ID NO: 16859 - DNA, 20 bp, synthetic construct
  misc_feature 1..20: note = Synthetic construct
  source 1..20: mol_type = other DNA
ccaccatgacccacttcgct

SEQ ID NO: 16860 - DNA, 20 bp, synthetic construct
  misc_feature 1..20: note = Synthetic construct
  source 1..20: mol_type = other DNA
ccactatgacccacttcgct

SEQ ID NO: 16861 - DNA, 20 bp, synthetic construct
  misc_feature 1..20: note = Synthetic construct
  source 1..20: mol_type = other DNA
ccacgctgacccacttcgct

SEQ ID NO: 16862 - DNA, 20 bp, synthetic construct
  misc_feature 1..20: note = Synthetic construct
  source 1..20: mol_type = other DNA
ccacggtgacccacttcgct

SEQ ID NO: 16863 - DNA, 20 bp, synthetic construct
  misc_feature 1..20: note = Synthetic construct
  source 1..20: mol_type = other DNA
ccacgttgacccacttcgct

SEQ ID NO: 16864 - DNA, 20 bp, synthetic construct
  misc_feature 1..20: note = Synthetic construct
  source 1..20: mol_type = other DNA
ccacgaagacccacttcgct

SEQ ID NO: 16865 - DNA, 20 bp, synthetic construct
  misc_feature 1..20: note = Synthetic construct
  source 1..20: mol_type = other DNA
ccacgacgacccacttcgct

SEQ ID NO: 16866 - DNA, 20 bp, synthetic construct
  misc_feature 1..20: note = Synthetic construct
  source 1..20: mol_type = other DNA
ccacgaggacccacttcgct

SEQ ID NO: 16867 - DNA, 20 bp, synthetic construct
  misc_feature 1..20: note = Synthetic construct
  source 1..20: mol_type = other DNA
ccacgataacccacttcgct

SEQ ID NO: 16868 - DNA, 20 bp, synthetic construct
  misc_feature 1..20: note = Synthetic construct
  source 1..20: mol_type = other DNA
ccacgatcacccacttcgct

SEQ ID NO: 16869 - DNA, 20 bp, synthetic construct
  misc_feature 1..20: note = Synthetic construct
  source 1..20: mol_type = other DNA
ccacgattacccacttcgct

SEQ ID NO: 16870 - DNA, 20 bp, synthetic construct
  misc_feature 1..20: note = Synthetic construct
  source 1..20: mol_type = other DNA
ccacgatgccccacttcgct

SEQ ID NO: 16871 - DNA, 20 bp, synthetic construct
  misc_feature 1..20: note = Synthetic construct
  source 1..20: mol_type = other DNA
ccacgatggcccacttcgct

SEQ ID NO: 16872 - DNA, 20 bp, synthetic construct
  misc_feature 1..20: note = Synthetic construct
  source 1..20: mol_type = other DNA
ccacgatgtcccacttcgct

SEQ ID NO: 16873 - DNA, 20 bp, synthetic construct
  misc_feature 1..20: note = Synthetic construct
  source 1..20: mol_type = other DNA
ccacgatgaaccacttcgct

SEQ ID NO: 16874 - DNA, 20 bp, synthetic construct
  misc_feature 1..20: note = Synthetic construct
  source 1..20: mol_type = other DNA
ccacgatgagccacttcgct

SEQ ID NO: 16875 - DNA, 20 bp, synthetic construct
  misc_feature 1..20: note = Synthetic construct
  source 1..20: mol_type = other DNA
ccacgatgatccacttcgct

SEQ ID NO: 16876 - DNA, 20 bp, synthetic construct
  misc_feature 1..20: note = Synthetic construct
  source 1..20: mol_type = other DNA
ccacgatgacacacttcgct

SEQ ID NO: 16877 - DNA, 20 bp, synthetic construct
  misc_feature 1..20: note = Synthetic construct
  source 1..20: mol_type = other DNA
ccacgatgacgcacttcgct

SEQ ID NO: 16878 - DNA, 20 bp, synthetic construct
  misc_feature 1..20: note = Synthetic construct
  source 1..20: mol_type = other DNA
ccacgatgactcacttcgct

SEQ ID NO: 16879 - DNA, 20 bp, synthetic construct
  misc_feature 1..20: note = Synthetic construct
  source 1..20: mol_type = other DNA
ccacgatgaccaacttcgct

SEQ ID NO: 16880 - DNA, 20 bp, synthetic construct
  misc_feature 1..20: note = Synthetic construct
  source 1..20: mol_type = other DNA
ccacgatgaccgacttcgct

SEQ ID NO: 16881 - DNA, 20 bp, synthetic construct
  misc_feature 1..20: note = Synthetic construct
  source 1..20: mol_type = other DNA
ccacgatgacctacttcgct

SEQ ID NO: 16882 - DNA, 20 bp, synthetic construct
  misc_feature 1..20: note = Synthetic construct
  source 1..20: mol_type = other DNA
ccacgatgacccccttcgct

SEQ ID NO: 16883 - DNA, 20 bp, synthetic construct
  misc_feature 1..20: note = Synthetic construct
  source 1..20: mol_type = other DNA
ccacgatgacccgcttcgct

SEQ ID NO: 16884 - DNA, 20 bp, synthetic construct
  misc_feature 1..20: note = Synthetic construct
  source 1..20: mol_type = other DNA
ccacgatgaccctcttcgct

SEQ ID NO: 16885 - DNA, 20 bp, synthetic construct
  misc_feature 1..20: note = Synthetic construct
  source 1..20: mol_type = other DNA
ccacgatgacccaattcgct

SEQ ID NO: 16886 - DNA, 20 bp, synthetic construct
  misc_feature 1..20: note = Synthetic construct
  source 1..20: mol_type = other DNA
ccacgatgacccagttcgct

SEQ ID NO: 16887 - DNA, 20 bp, synthetic construct
  misc_feature 1..20: note = Synthetic construct
  source 1..20: mol_type = other DNA
ccacgatgacccatttcgct

SEQ ID NO: 16888 - DNA, 20 bp, synthetic construct
  misc_feature 1..20: note = Synthetic construct
  source 1..20: mol_type = other DNA
ccacgatgacccacatcgct

SEQ ID NO: 16889 - DNA, 20 bp, synthetic construct
  misc_feature 1..20: note = Synthetic construct
  source 1..20: mol_type = other DNA
ccacgatgacccacctcgct

SEQ ID NO: 16890 - DNA, 20 bp, synthetic construct
  misc_feature 1..20: note = Synthetic construct
  source 1..20: mol_type = other DNA
ccacgatgacccacgtcgct

SEQ ID NO: 16891 - DNA, 20 bp, synthetic construct
  misc_feature 1..20: note = Synthetic construct
  source 1..20: mol_type = other DNA
ccacgatgacccactacgct

SEQ ID NO: 16892 - DNA, 20 bp, synthetic construct
  misc_feature 1..20: note = Synthetic construct
  source 1..20: mol_type = other DNA
ccacgatgacccactccgct

SEQ ID NO: 16893 - DNA, 20 bp, synthetic construct
  misc_feature 1..20: note = Synthetic construct
  source 1..20: mol_type = other DNA
ccacgatgacccactgcgct

SEQ ID NO: 16894 - DNA, 20 bp, synthetic construct
  misc_feature 1..20: note = Synthetic construct
  source 1..20: mol_type = other DNA
ccacgatgacccacttagct

SEQ ID NO: 16895 - DNA, 20 bp, synthetic construct
  misc_feature 1..20: note = Synthetic construct
  source 1..20: mol_type = other DNA
ccacgatgacccacttggct

SEQ ID NO: 16896 - DNA, 20 bp, synthetic construct
  misc_feature 1..20: note = Synthetic construct
  source 1..20: mol_type = other DNA
ccacgatgacccactttgct

SEQ ID NO: 16897 - DNA, 20 bp, synthetic construct
  misc_feature 1..20: note = Synthetic construct
  source 1..20: mol_type = other DNA
ccacgatgacccacttcact

SEQ ID NO: 16898 - DNA, 20 bp, synthetic construct
  misc_feature 1..20: note = Synthetic construct
  source 1..20: mol_type = other DNA
ccacgatgacccacttccct

SEQ ID NO: 16899 - DNA, 20 bp, synthetic construct
  misc_feature 1..20: note = Synthetic construct
  source 1..20: mol_type = other DNA
ccacgatgacccacttctct

SEQ ID NO: 16900 - DNA, 20 bp, synthetic construct
  misc_feature 1..20: note = Synthetic construct
  source 1..20: mol_type = other DNA
ccacgatgacccacttcgat

SEQ ID NO: 16901 - DNA, 20 bp, synthetic construct
  misc_feature 1..20: note = Synthetic construct
  source 1..20: mol_type = other DNA
ccacgatgacccacttcggt

SEQ ID NO: 16902 - DNA, 20 bp, synthetic construct
  misc_feature 1..20: note = Synthetic construct
  source 1..20: mol_type = other DNA
ccacgatgacccacttcgtt

SEQ ID NO: 16903 - DNA, 20 bp, synthetic construct
  misc_feature 1..20: note = Synthetic construct
  source 1..20: mol_type = other DNA
ccacgatgacccacttcgca

SEQ ID NO: 16904 - DNA, 20 bp, synthetic construct
  misc_feature 1..20: note = Synthetic construct
  source 1..20: mol_type = other DNA
ccacgatgacccacttcgcc

SEQ ID NO: 16905 - DNA, 20 bp, synthetic construct
  misc_feature 1..20: note = Synthetic construct
  source 1..20: mol_type = other DNA
ccacgatgacccacttcgcg

SEQ ID NO: 16906 - DNA, 23 bp, synthetic construct
  misc_feature 1..23: note = Synthetic construct
  source 1..23: mol_type = other DNA
attacctacaggtaggagccagt

SEQ ID NO: 16907 - DNA, 23 bp, synthetic construct
  misc_feature 1..23: note = Synthetic construct
  source 1..23: mol_type = other DNA
cttacctacaggtaggagccagt

SEQ ID NO: 16908 - DNA, 23 bp, synthetic construct
  misc_feature 1..23: note = Synthetic construct
  source 1..23: mol_type = other DNA
tttacctacaggtaggagccagt

SEQ ID NO: 16909 - DNA, 23 bp, synthetic construct
  misc_feature 1..23: note = Synthetic construct
  source 1..23: mol_type = other DNA
gatacctacaggtaggagccagt

SEQ ID NO: 16910 - DNA, 23 bp, synthetic construct
  misc_feature 1..23: note = Synthetic construct
  source 1..23: mol_type = other DNA
gctacctacaggtaggagccagt

SEQ ID NO: 16911 - DNA, 23 bp, synthetic construct
  misc_feature 1..23: note = Synthetic construct
  source 1..23: mol_type = other DNA
ggtacctacaggtaggagccagt

SEQ ID NO: 16912 - DNA, 23 bp, synthetic construct
  misc_feature 1..23: note = Synthetic construct
  source 1..23: mol_type = other DNA
gtaacctacaggtaggagccagt

SEQ ID NO: 16913 - DNA, 23 bp, synthetic construct
  misc_feature 1..23: note = Synthetic construct
  source 1..23: mol_type = other DNA
gtcacctacaggtaggagccagt

SEQ ID NO: 16914 - DNA, 23 bp, synthetic construct
  misc_feature 1..23: note = Synthetic construct
  source 1..23: mol_type = other DNA
gtgacctacaggtaggagccagt

SEQ ID NO: 16915 - DNA, 23 bp, synthetic construct
  misc_feature 1..23: note = Synthetic construct
  source 1..23: mol_type = other DNA
gttccctacaggtaggagccagt

SEQ ID NO: 16916 - DNA, 23 bp, synthetic construct
  misc_feature 1..23: note = Synthetic construct
  source 1..23: mol_type = other DNA
gttgcctacaggtaggagccagt

SEQ ID NO: 16917 - DNA, 23 bp, synthetic construct
  misc_feature 1..23: note = Synthetic construct
  source 1..23: mol_type = other DNA
gtttcctacaggtaggagccagt

SEQ ID NO: 16918 - DNA, 23 bp, synthetic construct
  misc_feature 1..23: note = Synthetic construct
  source 1..23: mol_type = other DNA
gttaactacaggtaggagccagt

SEQ ID NO: 16919 - DNA, 23 bp, synthetic construct
  misc_feature 1..23: note = Synthetic construct
  source 1..23: mol_type = other DNA
gttagctacaggtaggagccagt

SEQ ID NO: 16920 - DNA, 23 bp, synthetic construct
  misc_feature 1..23: note = Synthetic construct
  source 1..23: mol_type = other DNA
gttatctacaggtaggagccagt

SEQ ID NO: 16921 - DNA, 23 bp, synthetic construct
  misc_feature 1..23: note = Synthetic construct
  source 1..23: mol_type = other DNA
gttacatacaggtaggagccagt

SEQ ID NO: 16922 - DNA, 23 bp, synthetic construct
  misc_feature 1..23: note = Synthetic construct
  source 1..23: mol_type = other DNA
gttacgtacaggtaggagccagt

SEQ ID NO: 16923 - DNA, 23 bp, synthetic construct
  misc_feature 1..23: note = Synthetic construct
  source 1..23: mol_type = other DNA
gttacttacaggtaggagccagt

SEQ ID NO: 16924 - DNA, 23 bp, synthetic construct
  misc_feature 1..23: note = Synthetic construct
  source 1..23: mol_type = other DNA
gttaccaacaggtaggagccagt

SEQ ID NO: 16925 - DNA, 23 bp, synthetic construct
  misc_feature 1..23: note = Synthetic construct
  source 1..23: mol_type = other DNA
gttacccacaggtaggagccagt

SEQ ID NO: 16926 - DNA, 23 bp, synthetic construct
  misc_feature 1..23: note = Synthetic construct
  source 1..23: mol_type = other DNA
gttaccgacaggtaggagccagt

SEQ ID NO: 16927 - DNA, 23 bp, synthetic construct
  misc_feature 1..23: note = Synthetic construct
  source 1..23: mol_type = other DNA
gttacctccaggtaggagccagt

SEQ ID NO: 16928 - DNA, 23 bp, synthetic construct
  misc_feature 1..23: note = Synthetic construct
  source 1..23: mol_type = other DNA
gttacctgcaggtaggagccagt

SEQ ID NO: 16929 - DNA, 23 bp, synthetic construct
  misc_feature 1..23: note = Synthetic construct
  source 1..23: mol_type = other DNA
gttaccttcaggtaggagccagt

SEQ ID NO: 16930 - DNA, 23 bp, synthetic construct
  misc_feature 1..23: note = Synthetic construct
  source 1..23: mol_type = other DNA
gttacctaaaggtaggagccagt

SEQ ID NO: 16931 - DNA, 23 bp, synthetic construct
  misc_feature 1..23: note = Synthetic construct
  source 1..23: mol_type = other DNA
gttacctagaggtaggagccagt

SEQ ID NO: 16932 - DNA, 23 bp, synthetic construct
  misc_feature 1..23: note = Synthetic construct
  source 1..23: mol_type = other DNA
gttacctataggtaggagccagt

SEQ ID NO: 16933 - DNA, 23 bp, synthetic construct
  misc_feature 1..23: note = Synthetic construct
  source 1..23: mol_type = other DNA
gttacctaccggtaggagccagt

SEQ ID NO: 16934 - DNA, 23 bp, synthetic construct
  misc_feature 1..23: note = Synthetic construct
  source 1..23: mol_type = other DNA
gttacctacgggtaggagccagt

SEQ ID NO: 16935 - DNA, 23 bp, synthetic construct
  misc_feature 1..23: note = Synthetic construct
  source 1..23: mol_type = other DNA
gttacctactggtaggagccagt

SEQ ID NO: 16936 - DNA, 23 bp, synthetic construct
  misc_feature 1..23: note = Synthetic construct
  source 1..23: mol_type = other DNA
gttacctacaagtaggagccagt

SEQ ID NO: 16937 - DNA, 23 bp, synthetic construct
  misc_feature 1..23: note = Synthetic construct
  source 1..23: mol_type = other DNA
gttacctacacgtaggagccagt

SEQ ID NO: 16938 - DNA, 23 bp, synthetic construct
  misc_feature 1..23: note = Synthetic construct
  source 1..23: mol_type = other DNA
gttacctacatgtaggagccagt

SEQ ID NO: 16939 - DNA, 23 bp, synthetic construct
  misc_feature 1..23: note = Synthetic construct
  source 1..23: mol_type = other DNA
gttacctacagataggagccagt

SEQ ID NO: 16940 - DNA, 23 bp, synthetic construct
  misc_feature 1..23: note = Synthetic construct
  source 1..23: mol_type = other DNA
gttacctacagctaggagccagt

SEQ ID NO: 16941 - DNA, 23 bp, synthetic construct
  misc_feature 1..23: note = Synthetic construct
  source 1..23: mol_type = other DNA
gttacctacagttaggagccagt

SEQ ID NO: 16942 - DNA, 23 bp, synthetic construct
  misc_feature 1..23: note = Synthetic construct
  source 1..23: mol_type = other DNA
gttacctacaggaaggagccagt

SEQ ID NO: 16943 - DNA, 23 bp, synthetic construct
  misc_feature 1..23: note = Synthetic construct
  source 1..23: mol_type = other DNA
gttacctacaggcaggagccagt

SEQ ID NO: 16944 - DNA, 23 bp, synthetic construct
  misc_feature 1..23: note = Synthetic construct
  source 1..23: mol_type = other DNA
gttacctacagggaggagccagt

SEQ ID NO: 16945 - DNA, 23 bp, synthetic construct
  misc_feature 1..23: note = Synthetic construct
  source 1..23: mol_type = other DNA
gttacctacaggtcggagccagt

SEQ ID NO: 16946 - DNA, 23 bp, synthetic construct
  misc_feature 1..23: note = Synthetic construct
  source 1..23: mol_type = other DNA
gttacctacaggtgggagccagt

SEQ ID NO: 16947 - DNA, 23 bp, synthetic construct
  misc_feature 1..23: note = Synthetic construct
  source 1..23: mol_type = other DNA
gttacctacaggttggagccagt

SEQ ID NO: 16948 - DNA, 23 bp, synthetic construct
  misc_feature 1..23: note = Synthetic construct
  source 1..23: mol_type = other DNA
gttacctacaggtaagagccagt

SEQ ID NO: 16949 - DNA, 23 bp, synthetic construct
  misc_feature 1..23: note = Synthetic construct
  source 1..23: mol_type = other DNA
gttacctacaggtacgagccagt

SEQ ID NO: 16950 - DNA, 23 bp, synthetic construct
  misc_feature 1..23: note = Synthetic construct
  source 1..23: mol_type = other DNA
gttacctacaggtatgagccagt

SEQ ID NO: 16951 - DNA, 23 bp, synthetic construct
  misc_feature 1..23: note = Synthetic construct
  source 1..23: mol_type = other DNA
gttacctacaggtagaagccagt

SEQ ID NO: 16952 - DNA, 23 bp, synthetic construct
  misc_feature 1..23: note = Synthetic construct
  source 1..23: mol_type = other DNA
gttacctacaggtagcagccagt

SEQ ID NO: 16953 - DNA, 23 bp, synthetic construct
  misc_feature 1..23: note = Synthetic construct
  source 1..23: mol_type = other DNA
gttacctacaggtagtagccagt

SEQ ID NO: 16954 - DNA, 23 bp, synthetic construct
  misc_feature 1..23: note = Synthetic construct
  source 1..23: mol_type = other DNA
gttacctacaggtaggcgccagt

SEQ ID NO: 16955 - DNA, 23 bp, synthetic construct
  misc_feature 1..23: note = Synthetic construct
  source 1..23: mol_type = other DNA
gttacctacaggtaggggccagt

SEQ ID NO: 16956 - DNA, 23 bp, synthetic construct
  misc_feature 1..23: note = Synthetic construct
  source 1..23: mol_type = other DNA
gttacctacaggtaggtgccagt

SEQ ID NO: 16957 - DNA, 23 bp, synthetic construct
  misc_feature 1..23: note = Synthetic construct
  source 1..23: mol_type = other DNA
gttacctacaggtaggaaccagt

SEQ ID NO: 16958 - DNA, 23 bp, synthetic construct
  misc_feature 1..23: note = Synthetic construct
  source 1..23: mol_type = other DNA
gttacctacaggtaggacccagt

SEQ ID NO: 16959 - DNA, 23 bp, synthetic construct
  misc_feature 1..23: note = Synthetic construct
  source 1..23: mol_type = other DNA
gttacctacaggtaggatccagt

SEQ ID NO: 16960 - DNA, 23 bp, synthetic construct
  misc_feature 1..23: note = Synthetic construct
  source 1..23: mol_type = other DNA
gttacctacaggtaggagacagt

SEQ ID NO: 16961 - DNA, 23 bp, synthetic construct
  misc_feature 1..23: note = Synthetic construct
  source 1..23: mol_type = other DNA
gttacctacaggtaggaggcagt

SEQ ID NO: 16962 - DNA, 23 bp, synthetic construct
  misc_feature 1..23: note = Synthetic construct
  source 1..23: mol_type = other DNA
gttacctacaggtaggagtcagt

SEQ ID NO: 16963 - DNA, 23 bp, synthetic construct
  misc_feature 1..23: note = Synthetic construct
  source 1..23: mol_type = other DNA
gttacctacaggtaggagcaagt

SEQ ID NO: 16964 - DNA, 23 bp, synthetic construct
  misc_feature 1..23: note = Synthetic construct
  source 1..23: mol_type = other DNA
gttacctacaggtaggagcgagt

SEQ ID NO: 16965 - DNA, 23 bp, synthetic construct
  misc_feature 1..23: note = Synthetic construct
  source 1..23: mol_type = other DNA
gttacctacaggtaggagctagt

SEQ ID NO: 16966 - DNA, 23 bp, synthetic construct
  misc_feature 1..23: note = Synthetic construct
  source 1..23: mol_type = other DNA
gttacctacaggtaggagcccgt

SEQ ID NO: 16967 - DNA, 23 bp, synthetic construct
  misc_feature 1..23: note = Synthetic construct
  source 1..23: mol_type = other DNA
gttacctacaggtaggagccggt

SEQ ID NO: 16968 - DNA, 23 bp, synthetic construct
  misc_feature 1..23: note = Synthetic construct
  source 1..23: mol_type = other DNA
gttacctacaggtaggagcctgt

SEQ ID NO: 16969 - DNA, 23 bp, synthetic construct
  misc_feature 1..23: note = Synthetic construct
  source 1..23: mol_type = other DNA
gttacctacaggtaggagccaat

SEQ ID NO: 16970 - DNA, 23 bp, synthetic construct
  misc_feature 1..23: note = Synthetic construct
  source 1..23: mol_type = other DNA
gttacctacaggtaggagccact

SEQ ID NO: 16971 - DNA, 23 bp, synthetic construct
  misc_feature 1..23: note = Synthetic construct
  source 1..23: mol_type = other DNA
gttacctacaggtaggagccatt

SEQ ID NO: 16972 - DNA, 23 bp, synthetic construct
  misc_feature 1..23: note = Synthetic construct
  source 1..23: mol_type = other DNA
gttacctacaggtaggagccaga

SEQ ID NO: 16973 - DNA, 23 bp, synthetic construct
  misc_feature 1..23: note = Synthetic construct
  source 1..23: mol_type = other DNA
gttacctacaggtaggagccagc

SEQ ID NO: 16974 - DNA, 23 bp, synthetic construct
  misc_feature 1..23: note = Synthetic construct
  source 1..23: mol_type = other DNA
gttacctacaggtaggagccagg

SEQ ID NO: 16975 - DNA, 22 bp, synthetic construct
  misc_feature 1..22: note = Synthetic construct
  source 1..22: mol_type = other DNA
acggatcaccgcttccagtagc

SEQ ID NO: 16976 - DNA, 22 bp, synthetic construct
  misc_feature 1..22: note = Synthetic construct
  source 1..22: mol_type = other DNA
ccggatcaccgcttccagtagc

SEQ ID NO: 16977 - DNA, 22 bp, synthetic construct
  misc_feature 1..22: note = Synthetic construct
  source 1..22: mol_type = other DNA
tcggatcaccgcttccagtagc

SEQ ID NO: 16978 - DNA, 22 bp, synthetic construct
  misc_feature 1..22: note = Synthetic construct
  source 1..22: mol_type = other DNA
gaggatcaccgcttccagtagc

SEQ ID NO: 16979 - DNA, 22 bp, synthetic construct
  misc_feature 1..22: note = Synthetic construct
  source 1..22: mol_type = other DNA
ggggatcaccgcttccagtagc

SEQ ID NO: 16980 - DNA, 22 bp, synthetic construct
  misc_feature 1..22: note = Synthetic construct
  source 1..22: mol_type = other DNA
gtggatcaccgcttccagtagc

SEQ ID NO: 16981 - DNA, 22 bp, synthetic construct
  misc_feature 1..22: note = Synthetic construct
  source 1..22: mol_type = other DNA
gcagatcaccgcttccagtagc

SEQ ID NO: 16982 - DNA, 22 bp, synthetic construct
  misc_feature 1..22: note = Synthetic construct
  source 1..22: mol_type = other DNA
gccgatcaccgcttccagtagc

SEQ ID NO: 16983 - DNA, 22 bp, synthetic construct
  misc_feature 1..22: note = Synthetic construct
  source 1..22: mol_type = other DNA
gctgatcaccgcttccagtagc

SEQ ID NO: 16984 - DNA, 22 bp, synthetic construct
  misc_feature 1..22: note = Synthetic construct
  source 1..22: mol_type = other DNA
gcgaatcaccgcttccagtagc

SEQ ID NO: 16985 - DNA, 22 bp, synthetic construct
  misc_feature 1..22: note = Synthetic construct
  source 1..22: mol_type = other DNA
gcgcatcaccgcttccagtagc

SEQ ID NO: 16986 - DNA, 22 bp, synthetic construct
  misc_feature 1..22: note = Synthetic construct
  source 1..22: mol_type = other DNA
gcgtatcaccgcttccagtagc

SEQ ID NO: 16987 - DNA, 22 bp, synthetic construct
  misc_feature 1..22: note = Synthetic construct
  source 1..22: mol_type = other DNA
gcggctcaccgcttccagtagc

SEQ ID NO: 16988 - DNA, 22 bp, synthetic construct
  misc_feature 1..22: note = Synthetic construct
  source 1..22: mol_type = other DNA
gcgggtcaccgcttccagtagc

SEQ ID NO: 16989 - DNA, 22 bp, synthetic construct
  misc_feature 1..22: note = Synthetic construct
  source 1..22: mol_type = other DNA
gcggttcaccgcttccagtagc

SEQ ID NO: 16990 - DNA, 22 bp, synthetic construct
  misc_feature 1..22: note = Synthetic construct
  source 1..22: mol_type = other DNA
gcggaacaccgcttccagtagc

SEQ ID NO: 16991 - DNA, 22 bp, synthetic construct
  misc_feature 1..22: note = Synthetic construct
  source 1..22: mol_type = other DNA
gcggaccaccgcttccagtagc

SEQ ID NO: 16992 - DNA, 22 bp, synthetic construct
  misc_feature 1..22: note = Synthetic construct
  source 1..22: mol_type = other DNA
gcggagcaccgcttccagtagc

SEQ ID NO: 16993 - DNA, 22 bp, synthetic construct
  misc_feature 1..22: note = Synthetic construct
  source 1..22: mol_type = other DNA
gcggataaccgcttccagtagc

SEQ ID NO: 16994 - DNA, 22 bp, synthetic construct
  misc_feature 1..22: note = Synthetic construct
  source 1..22: mol_type = other DNA
gcggatgaccgcttccagtagc

SEQ ID NO: 16995 - DNA, 22 bp, synthetic construct
  misc_feature 1..22: note = Synthetic construct
  source 1..22: mol_type = other DNA
gcggattaccgcttccagtagc

SEQ ID NO: 16996 - DNA, 22 bp, synthetic construct
  misc_feature 1..22: note = Synthetic construct
  source 1..22: mol_type = other DNA
gcggatccccgcttccagtagc

SEQ ID NO: 16997 - DNA, 22 bp, synthetic construct
  misc_feature 1..22: note = Synthetic construct
  source 1..22: mol_type = other DNA
gcggatcgccgcttccagtagc

SEQ ID NO: 16998 - DNA, 22 bp, synthetic construct
  misc_feature 1..22: note = Synthetic construct
  source 1..22: mol_type = other DNA
gcggatctccgcttccagtagc

SEQ ID NO: 16999 - DNA, 22 bp, synthetic construct
  misc_feature 1..22: note = Synthetic construct
  source 1..22: mol_type = other DNA
gcggatcaacgcttccagtagc

SEQ ID NO: 17000 - DNA, 22 bp, synthetic construct
  misc_feature 1..22: note = Synthetic construct
  source 1..22: mol_type = other DNA
gcggatcagcgcttccagtagc

SEQ ID NO: 17001 - DNA, 22 bp, synthetic construct
  misc_feature 1..22: note = Synthetic construct
  source 1..22: mol_type = other DNA
gcggatcatcgcttccagtagc

SEQ ID NO: 17002 - DNA, 22 bp, synthetic construct
  misc_feature 1..22: note = Synthetic construct
  source 1..22: mol_type = other DNA
gcggatcacagcttccagtagc

SEQ ID NO: 17003 - DNA, 22 bp, synthetic construct
  misc_feature 1..22: note = Synthetic construct
  source 1..22: mol_type = other DNA
gcggatcacggcttccagtagc

SEQ ID NO: 17004 - DNA, 22 bp, synthetic construct
  misc_feature 1..22: note = Synthetic construct
  source 1..22: mol_type = other DNA
gcggatcactgcttccagtagc

SEQ ID NO: 17005 - DNA, 22 bp, synthetic construct
  misc_feature 1..22: note = Synthetic construct
  source 1..22: mol_type = other DNA
gcggatcaccacttccagtagc

SEQ ID NO: 17006 - DNA, 22 bp, synthetic construct
  misc_feature 1..22: note = Synthetic construct
  source 1..22: mol_type = other DNA
gcggatcaccccttccagtagc

SEQ ID NO: 17007 - DNA, 22 bp, synthetic construct
  misc_feature 1..22: note = Synthetic construct
  source 1..22: mol_type = other DNA
gcggatcacctcttccagtagc

SEQ ID NO: 17008 - DNA, 22 bp, synthetic construct
  misc_feature 1..22: note = Synthetic construct
  source 1..22: mol_type = other DNA
gcggatcaccgattccagtagc

SEQ ID NO: 17009 - DNA, 22 bp, synthetic construct
  misc_feature 1..22: note = Synthetic construct
  source 1..22: mol_type = other DNA
gcggatcaccggttccagtagc

SEQ ID NO: 17010 - DNA, 22 bp, synthetic construct
  misc_feature 1..22: note = Synthetic construct
  source 1..22: mol_type = other DNA
gcggatcaccgtttccagtagc

SEQ ID NO: 17011 - DNA, 22 bp, synthetic construct
  misc_feature 1..22: note = Synthetic construct
  source 1..22: mol_type = other DNA
gcggatcaccgcatccagtagc

SEQ ID NO: 17012 - DNA, 22 bp, synthetic construct
  misc_feature 1..22: note = Synthetic construct
  source 1..22: mol_type = other DNA
gcggatcaccgcctccagtagc

SEQ ID NO: 17013 - DNA, 22 bp, synthetic construct
  misc_feature 1..22: note = Synthetic construct
  source 1..22: mol_type = other DNA
gcggatcaccgcgtccagtagc

SEQ ID NO: 17014 - DNA, 22 bp, synthetic construct
  misc_feature 1..22: note = Synthetic construct
  source 1..22: mol_type = other DNA
gcggatcaccgctaccagtagc

SEQ ID NO: 17015 - DNA, 22 bp, synthetic construct
  misc_feature 1..22: note = Synthetic construct
  source 1..22: mol_type = other DNA
gcggatcaccgctcccagtagc

SEQ ID NO: 17016 - DNA, 22 bp, synthetic construct
  misc_feature 1..22: note = Synthetic construct
  source 1..22: mol_type = other DNA
gcggatcaccgctgccagtagc

SEQ ID NO: 17017 - DNA, 22 bp, synthetic construct
  misc_feature 1..22: note = Synthetic construct
  source 1..22: mol_type = other DNA
gcggatcaccgcttacagtagc

SEQ ID NO: 17018 - DNA, 22 bp, synthetic construct
  misc_feature 1..22: note = Synthetic construct
  source 1..22: mol_type = other DNA
gcggatcaccgcttgcagtagc

SEQ ID NO: 17019 - DNA, 22 bp, synthetic construct
  misc_feature 1..22: note = Synthetic construct
  source 1..22: mol_type = other DNA
gcggatcaccgctttcagtagc

SEQ ID NO: 17020 - DNA, 22 bp, synthetic construct
  misc_feature 1..22: note = Synthetic construct
  source 1..22: mol_type = other DNA
gcggatcaccgcttcaagtagc

SEQ ID NO: 17021 - DNA, 22 bp, synthetic construct
  misc_feature 1..22: note = Synthetic construct
  source 1..22: mol_type = other DNA
gcggatcaccgcttcgagtagc

SEQ ID NO: 17022 - DNA, 22 bp, synthetic construct
  misc_feature 1..22: note = Synthetic construct
  source 1..22: mol_type = other DNA
gcggatcaccgcttctagtagc

SEQ ID NO: 17023 - DNA, 22 bp, synthetic construct
  misc_feature 1..22: note = Synthetic construct
  source 1..22: mol_type = other DNA
gcggatcaccgcttcccgtagc

SEQ ID NO: 17024 - DNA, 22 bp, synthetic construct
  misc_feature 1..22: note = Synthetic construct
  source 1..22: mol_type = other DNA
gcggatcaccgcttccggtagc

SEQ ID NO: 17025 - DNA, 22 bp, synthetic construct
  misc_feature 1..22: note = Synthetic construct
  source 1..22: mol_type = other DNA
gcggatcaccgcttcctgtagc

SEQ ID NO: 17026 - DNA, 22 bp, synthetic construct
  misc_feature 1..22: note = Synthetic construct
  source 1..22: mol_type = other DNA
gcggatcaccgcttccaatagc

SEQ ID NO: 17027 - DNA, 22 bp, synthetic construct
  misc_feature 1..22: note = Synthetic construct
  source 1..22: mol_type = other DNA
gcggatcaccgcttccactagc

SEQ ID NO: 17028 - DNA, 22 bp, synthetic construct
  misc_feature 1..22: note = Synthetic construct
  source 1..22: mol_type = other DNA
gcggatcaccgcttccattagc

SEQ ID NO: 17029 - DNA, 22 bp, synthetic construct
  misc_feature 1..22: note = Synthetic construct
  source 1..22: mol_type = other DNA
gcggatcaccgcttccagaagc

SEQ ID NO: 17030 - DNA, 22 bp, synthetic construct
  misc_feature 1..22: note = Synthetic construct
  source 1..22: mol_type = other DNA
gcggatcaccgcttccagcagc

SEQ ID NO: 17031 - DNA, 22 bp, synthetic construct
  misc_feature 1..22: note = Synthetic construct
  source 1..22: mol_type = other DNA
gcggatcaccgcttccaggagc

SEQ ID NO: 17032 - DNA, 22 bp, synthetic construct
  misc_feature 1..22: note = Synthetic construct
  source 1..22: mol_type = other DNA
gcggatcaccgcttccagtcgc

SEQ ID NO: 17033 - DNA, 22 bp, synthetic construct
  misc_feature 1..22: note = Synthetic construct
  source 1..22: mol_type = other DNA
gcggatcaccgcttccagtggc

SEQ ID NO: 17034 - DNA, 22 bp, synthetic construct
  misc_feature 1..22: note = Synthetic construct
  source 1..22: mol_type = other DNA
gcggatcaccgcttccagttgc

SEQ ID NO: 17035 - DNA, 22 bp, synthetic construct
  misc_feature 1..22: note = Synthetic construct
  source 1..22: mol_type = other DNA
gcggatcaccgcttccagtaac

SEQ ID NO: 17036 - DNA, 22 bp, synthetic construct
  misc_feature 1..22: note = Synthetic construct
  source 1..22: mol_type = other DNA
gcggatcaccgcttccagtacc

SEQ ID NO: 17037 - DNA, 22 bp, synthetic construct
  misc_feature 1..22: note = Synthetic construct
  source 1..22: mol_type = other DNA
gcggatcaccgcttccagtatc

SEQ ID NO: 17038 - DNA, 22 bp, synthetic construct
  misc_feature 1..22: note = Synthetic construct
  source 1..22: mol_type = other DNA
gcggatcaccgcttccagtaga

SEQ ID NO: 17039 - DNA, 22 bp, synthetic construct
  misc_feature 1..22: note = Synthetic construct
  source 1..22: mol_type = other DNA
gcggatcaccgcttccagtagg

SEQ ID NO: 17040 - DNA, 22 bp, synthetic construct
  misc_feature 1..22: note = Synthetic construct
  source 1..22: mol_type = other DNA
gcggatcaccgcttccagtagt

SEQ ID NO: 17041 - DNA, 21 bp, synthetic construct
  misc_feature 1..21: note = Synthetic construct
  source 1..21: mol_type = other DNA
cccaacggatttgagccggcg

SEQ ID NO: 17042 - DNA, 21 bp, synthetic construct
  misc_feature 1..21: note = Synthetic construct
  source 1..21: mol_type = other DNA
gccaacggatttgagccggcg

SEQ ID NO: 17043 - DNA, 21 bp, synthetic construct
  misc_feature 1..21: note = Synthetic construct
  source 1..21: mol_type = other DNA
tccaacggatttgagccggcg

SEQ ID NO: 17044 - DNA, 21 bp, synthetic construct
  misc_feature 1..21: note = Synthetic construct
  source 1..21: mol_type = other DNA
aacaacggatttgagccggcg

SEQ ID NO: 17045 - DNA, 21 bp, synthetic construct
  misc_feature 1..21: note = Synthetic construct
  source 1..21: mol_type = other DNA
agcaacggatttgagccggcg

SEQ ID NO: 17046 - DNA, 21 bp, synthetic construct
  misc_feature 1..21: note = Synthetic construct
  source 1..21: mol_type = other DNA
atcaacggatttgagccggcg

SEQ ID NO: 17047 - DNA, 21 bp, synthetic construct
  misc_feature 1..21: note = Synthetic construct
  source 1..21: mol_type = other DNA
acaaacggatttgagccggcg

SEQ ID NO: 17048 - DNA, 21 bp, synthetic construct
  misc_feature 1..21: note = Synthetic construct
  source 1..21: mol_type = other DNA
acgaacggatttgagccggcg

SEQ ID NO: 17049 - DNA, 21 bp, synthetic construct
  misc_feature 1..21: note = Synthetic construct
  source 1..21: mol_type = other DNA
actaacggatttgagccggcg

SEQ ID NO: 17050 - DNA, 21 bp, synthetic construct
  misc_feature 1..21: note = Synthetic construct
  source 1..21: mol_type = other DNA
acccacggatttgagccggcg

SEQ ID NO: 17051 - DNA, 21 bp, synthetic construct
  misc_feature 1..21: note = Synthetic construct
  source 1..21: mol_type = other DNA
accgacggatttgagccggcg

SEQ ID NO: 17052 - DNA, 21 bp, synthetic construct
  misc_feature 1..21: note = Synthetic construct
  source 1..21: mol_type = other DNA
acctacggatttgagccggcg

SEQ ID NO: 17053 - DNA, 21 bp, synthetic construct
  misc_feature 1..21: note = Synthetic construct
  source 1..21: mol_type = other DNA
accaccggatttgagccggcg

SEQ ID NO: 17054 - DNA, 21 bp, synthetic construct
  misc_feature 1..21: note = Synthetic construct
  source 1..21: mol_type = other DNA
accagcggatttgagccggcg

SEQ ID NO: 17055 - DNA, 21 bp, synthetic construct
  misc_feature 1..21: note = Synthetic construct
  source 1..21: mol_type = other DNA
accatcggatttgagccggcg

SEQ ID NO: 17056 - DNA, 21 bp, synthetic construct
  misc_feature 1..21: note = Synthetic construct
  source 1..21: mol_type = other DNA
accaaaggatttgagccggcg

SEQ ID NO: 17057 - DNA, 21 bp, synthetic construct
  misc_feature 1..21: note = Synthetic construct
  source 1..21: mol_type = other DNA
accaagggatttgagccggcg

SEQ ID NO: 17058 - DNA, 21 bp, synthetic construct
  misc_feature 1..21: note = Synthetic construct
  source 1..21: mol_type = other DNA
accaatggatttgagccggcg

SEQ ID NO: 17059 - DNA, 21 bp, synthetic construct
  misc_feature 1..21: note = Synthetic construct
  source 1..21: mol_type = other DNA
accaacagatttgagccggcg

SEQ ID NO: 17060 - DNA, 21 bp, synthetic construct
  misc_feature 1..21: note = Synthetic construct
  source 1..21: mol_type = other DNA
accaaccgatttgagccggcg

SEQ ID NO: 17061 - DNA, 21 bp, synthetic construct
  misc_feature 1..21: note = Synthetic construct
  source 1..21: mol_type = other DNA
accaactgatttgagccggcg

SEQ ID NO: 17062 - DNA, 21 bp, synthetic construct
  misc_feature 1..21: note = Synthetic construct
  source 1..21: mol_type = other DNA
accaacgaatttgagccggcg

SEQ ID NO: 17063 - DNA, 21 bp, synthetic construct
  misc_feature 1..21: note = Synthetic construct
  source 1..21: mol_type = other DNA
accaacgcatttgagccggcg

SEQ ID NO: 17064 - DNA, 21 bp, synthetic construct
  misc_feature 1..21: note = Synthetic construct
  source 1..21: mol_type = other DNA
accaacgtatttgagccggcg

SEQ ID NO: 17065 - DNA, 21 bp, synthetic construct
  misc_feature 1..21: note = Synthetic construct
  source 1..21: mol_type = other DNA
accaacggctttgagccggcg

SEQ ID NO: 17066 - DNA, 21 bp, synthetic construct
  misc_feature 1..21: note = Synthetic construct
  source 1..21: mol_type = other DNA
accaacgggtttgagccggcg

SEQ ID NO: 17067 - DNA, 21 bp, synthetic construct
  misc_feature 1..21: note = Synthetic construct
  source 1..21: mol_type = other DNA
accaacggttttgagccggcg

SEQ ID NO: 17068 - DNA, 21 bp, synthetic construct
  misc_feature 1..21: note = Synthetic construct
  source 1..21: mol_type = other DNA
accaacggaattgagccggcg

SEQ ID NO: 17069 - DNA, 21 bp, synthetic construct
  misc_feature 1..21: note = Synthetic construct
  source 1..21: mol_type = other DNA
accaacggacttgagccggcg

SEQ ID NO: 17070 - DNA, 21 bp, synthetic construct
  misc_feature 1..21: note = Synthetic construct
  source 1..21: mol_type = other DNA
accaacggagttgagccggcg

SEQ ID NO: 17071 - DNA, 21 bp, synthetic construct
  misc_feature 1..21: note = Synthetic construct
  source 1..21: mol_type = other DNA
accaacggatatgagccggcg

SEQ ID NO: 17072 - DNA, 21 bp, synthetic construct
  misc_feature 1..21: note = Synthetic construct
  source 1..21: mol_type = other DNA
accaacggatctgagccggcg

SEQ ID NO: 17073 - DNA, 21 bp, synthetic construct
  misc_feature 1..21: note = Synthetic construct
  source 1..21: mol_type = other DNA
accaacggatgtgagccggcg

SEQ ID NO: 17074 - DNA, 21 bp, synthetic construct
  misc_feature 1..21: note = Synthetic construct
  source 1..21: mol_type = other DNA
accaacggattagagccggcg

SEQ ID NO: 17075 - DNA, 21 bp, synthetic construct
  misc_feature 1..21: note = Synthetic construct
  source 1..21: mol_type = other DNA
accaacggattcgagccggcg

SEQ ID NO: 17076 - DNA, 21 bp, synthetic construct
  misc_feature 1..21: note = Synthetic construct
  source 1..21: mol_type = other DNA
accaacggattggagccggcg

SEQ ID NO: 17077 - DNA, 21 bp, synthetic construct
  misc_feature 1..21: note = Synthetic construct
  source 1..21: mol_type = other DNA
accaacggatttaagccggcg

SEQ ID NO: 17078 - DNA, 21 bp, synthetic construct
  misc_feature 1..21: note = Synthetic construct
  source 1..21: mol_type = other DNA
accaacggatttcagccggcg

SEQ ID NO: 17079 - DNA, 21 bp, synthetic construct
  misc_feature 1..21: note = Synthetic construct
  source 1..21: mol_type = other DNA
accaacggattttagccggcg

SEQ ID NO: 17080 - DNA, 21 bp, synthetic construct
  misc_feature 1..21: note = Synthetic construct
  source 1..21: mol_type = other DNA
accaacggatttgcgccggcg

SEQ ID NO: 17081 - DNA, 21 bp, synthetic construct
  misc_feature 1..21: note = Synthetic construct
  source 1..21: mol_type = other DNA
accaacggatttgggccggcg

SEQ ID NO: 17082 - DNA, 21 bp, synthetic construct
  misc_feature 1..21: note = Synthetic construct
  source 1..21: mol_type = other DNA
accaacggatttgtgccggcg

SEQ ID NO: 17083 - DNA, 21 bp, synthetic construct
  misc_feature 1..21: note = Synthetic construct
  source 1..21: mol_type = other DNA
accaacggatttgaaccggcg

SEQ ID NO: 17084 - DNA, 21 bp, synthetic construct
  misc_feature 1..21: note = Synthetic construct
  source 1..21: mol_type = other DNA
accaacggatttgacccggcg

SEQ ID NO: 17085 - DNA, 21 bp, synthetic construct
  misc_feature 1..21: note = Synthetic construct
  source 1..21: mol_type = other DNA
accaacggatttgatccggcg

SEQ ID NO: 17086 - DNA, 21 bp, synthetic construct
  misc_feature 1..21: note = Synthetic construct
  source 1..21: mol_type = other DNA
accaacggatttgagacggcg

SEQ ID NO: 17087 - DNA, 21 bp, synthetic construct
  misc_feature 1..21: note = Synthetic construct
  source 1..21: mol_type = other DNA
accaacggatttgaggcggcg

SEQ ID NO: 17088 - DNA, 21 bp, synthetic construct
  misc_feature 1..21: note = Synthetic construct
  source 1..21: mol_type = other DNA
accaacggatttgagtcggcg

SEQ ID NO: 17089 - DNA, 21 bp, synthetic construct
  misc_feature 1..21: note = Synthetic construct
  source 1..21: mol_type = other DNA
accaacggatttgagcaggcg

SEQ ID NO: 17090 - DNA, 21 bp, synthetic construct
  misc_feature 1..21: note = Synthetic construct
  source 1..21: mol_type = other DNA
accaacggatttgagcgggcg

SEQ ID NO: 17091 - DNA, 21 bp, synthetic construct
  misc_feature 1..21: note = Synthetic construct
  source 1..21: mol_type = other DNA
accaacggatttgagctggcg

SEQ ID NO: 17092 - DNA, 21 bp, synthetic construct
  misc_feature 1..21: note = Synthetic construct
  source 1..21: mol_type = other DNA
accaacggatttgagccagcg

SEQ ID NO: 17093 - DNA, 21 bp, synthetic construct
  misc_feature 1..21: note = Synthetic construct
  source 1..21: mol_type = other DNA
accaacggatttgagcccgcg

SEQ ID NO: 17094 - DNA, 21 bp, synthetic construct
  misc_feature 1..21: note = Synthetic construct
  source 1..21: mol_type = other DNA
accaacggatttgagcctgcg

SEQ ID NO: 17095 - DNA, 21 bp, synthetic construct
  misc_feature 1..21: note = Synthetic construct
  source 1..21: mol_type = other DNA
accaacggatttgagccgacg

SEQ ID NO: 17096 - DNA, 21 bp, synthetic construct
  misc_feature 1..21: note = Synthetic construct
  source 1..21: mol_type = other DNA
accaacggatttgagccgccg

SEQ ID NO: 17097 - DNA, 21 bp, synthetic construct
  misc_feature 1..21: note = Synthetic construct
  source 1..21: mol_type = other DNA
accaacggatttgagccgtcg

SEQ ID NO: 17098 - DNA, 21 bp, synthetic construct
  misc_feature 1..21: note = Synthetic construct
  source 1..21: mol_type = other DNA
accaacggatttgagccggag

SEQ ID NO: 17099 - DNA, 21 bp, synthetic construct
  misc_feature 1..21: note = Synthetic construct
  source 1..21: mol_type = other DNA
accaacggatttgagccgggg

SEQ ID NO: 17100 - DNA, 21 bp, synthetic construct
  misc_feature 1..21: note = Synthetic construct
  source 1..21: mol_type = other DNA
accaacggatttgagccggtg

SEQ ID NO: 17101 - DNA, 21 bp, synthetic construct
  misc_feature 1..21: note = Synthetic construct
  source 1..21: mol_type = other DNA
accaacggatttgagccggca

SEQ ID NO: 17102 - DNA, 21 bp, synthetic construct
  misc_feature 1..21: note = Synthetic construct
  source 1..21: mol_type = other DNA
accaacggatttgagccggcc

SEQ ID NO: 17103 - DNA, 21 bp, synthetic construct
  misc_feature 1..21: note = Synthetic construct
  source 1..21: mol_type = other DNA
accaacggatttgagccggct

SEQ ID NO: 17104 - DNA, 22 bp, synthetic construct
  misc_feature 1..22: note = Synthetic construct
  source 1..22: mol_type = other DNA
cagcctgtgaacgcgagttaga

SEQ ID NO: 17105 - DNA, 22 bp, synthetic construct
  misc_feature 1..22: note = Synthetic construct
  source 1..22: mol_type = other DNA
gagcctgtgaacgcgagttaga

SEQ ID NO: 17106 - DNA, 22 bp, synthetic construct
  misc_feature 1..22: note = Synthetic construct
  source 1..22: mol_type = other DNA
tagcctgtgaacgcgagttaga

SEQ ID NO: 17107 - DNA, 22 bp, synthetic construct
  misc_feature 1..22: note = Synthetic construct
  source 1..22: mol_type = other DNA
acgcctgtgaacgcgagttaga

SEQ ID NO: 17108 - DNA, 22 bp, synthetic construct
  misc_feature 1..22: note = Synthetic construct
  source 1..22: mol_type = other DNA
aggcctgtgaacgcgagttaga

SEQ ID NO: 17109 - DNA, 22 bp, synthetic construct
  misc_feature 1..22: note = Synthetic construct
  source 1..22: mol_type = other DNA
atgcctgtgaacgcgagttaga

SEQ ID NO: 17110 - DNA, 22 bp, synthetic construct
  misc_feature 1..22: note = Synthetic construct
  source 1..22: mol_type = other DNA
aaacctgtgaacgcgagttaga

SEQ ID NO: 17111 - DNA, 22 bp, synthetic construct
  misc_feature 1..22: note = Synthetic construct
  source 1..22: mol_type = other DNA
aaccctgtgaacgcgagttaga

SEQ ID NO: 17112 - DNA, 22 bp, synthetic construct
  misc_feature 1..22: note = Synthetic construct
  source 1..22: mol_type = other DNA
aatcctgtgaacgcgagttaga

SEQ ID NO: 17113 - DNA, 22 bp, synthetic construct
  misc_feature 1..22: note = Synthetic construct
  source 1..22: mol_type = other DNA
aagactgtgaacgcgagttaga

SEQ ID NO: 17114 - DNA, 22 bp, synthetic construct
  misc_feature 1..22: note = Synthetic construct
  source 1..22: mol_type = other DNA
aaggctgtgaacgcgagttaga

SEQ ID NO: 17115 - DNA, 22 bp, synthetic construct
  misc_feature 1..22: note = Synthetic construct
  source 1..22: mol_type = other DNA
aagtctgtgaacgcgagttaga

SEQ ID NO: 17116 - DNA, 22 bp, synthetic construct
  misc_feature 1..22: note = Synthetic construct
  source 1..22: mol_type = other DNA
aagcatgtgaacgcgagttaga

SEQ ID NO: 17117 - DNA, 22 bp, synthetic construct
  misc_feature 1..22: note = Synthetic construct
  source 1..22: mol_type = other DNA
aagcgtgtgaacgcgagttaga

SEQ ID NO: 17118 - DNA, 22 bp, synthetic construct
  misc_feature 1..22: note = Synthetic construct
  source 1..22: mol_type = other DNA
aagcttgtgaacgcgagttaga

SEQ ID NO: 17119 - DNA, 22 bp, synthetic construct
  misc_feature 1..22: note = Synthetic construct
  source 1..22: mol_type = other DNA
aagccagtgaacgcgagttaga

SEQ ID NO: 17120 - DNA, 22 bp, synthetic construct
  misc_feature 1..22: note = Synthetic construct
  source 1..22: mol_type = other DNA
aagcccgtgaacgcgagttaga

SEQ ID NO: 17121 - DNA, 22 bp, synthetic construct
  misc_feature 1..22: note = Synthetic construct
  source 1..22: mol_type = other DNA
aagccggtgaacgcgagttaga

SEQ ID NO: 17122 - DNA, 22 bp, synthetic construct
  misc_feature 1..22: note = Synthetic construct
  source 1..22: mol_type = other DNA
aagcctatgaacgcgagttaga

SEQ ID NO: 17123 - DNA, 22 bp, synthetic construct
  misc_feature 1..22: note = Synthetic construct
  source 1..22: mol_type = other DNA
aagcctctgaacgcgagttaga

SEQ ID NO: 17124 - DNA, 22 bp, synthetic construct
  misc_feature 1..22: note = Synthetic construct
  source 1..22: mol_type = other DNA
aagcctttgaacgcgagttaga

SEQ ID NO: 17125 - DNA, 22 bp, synthetic construct
  misc_feature 1..22: note = Synthetic construct
  source 1..22: mol_type = other DNA
aagcctgagaacgcgagttaga

SEQ ID NO: 17126 - DNA, 22 bp, synthetic construct
  misc_feature 1..22: note = Synthetic construct
  source 1..22: mol_type = other DNA
aagcctgcgaacgcgagttaga

SEQ ID NO: 17127 - DNA, 22 bp, synthetic construct
  misc_feature 1..22: note = Synthetic construct
  source 1..22: mol_type = other DNA
aagcctgggaacgcgagttaga

SEQ ID NO: 17128 - DNA, 22 bp, synthetic construct
  misc_feature 1..22: note = Synthetic construct
  source 1..22: mol_type = other DNA
aagcctgtaaacgcgagttaga

SEQ ID NO: 17129 - DNA, 22 bp, synthetic construct
  misc_feature 1..22: note = Synthetic construct
  source 1..22: mol_type = other DNA
aagcctgtcaacgcgagttaga

SEQ ID NO: 17130 - DNA, 22 bp, synthetic construct
  misc_feature 1..22: note = Synthetic construct
  source 1..22: mol_type = other DNA
aagcctgttaacgcgagttaga

SEQ ID NO: 17131 - DNA, 22 bp, synthetic construct
  misc_feature 1..22: note = Synthetic construct
  source 1..22: mol_type = other DNA
aagcctgtgcacgcgagttaga

SEQ ID NO: 17132 - DNA, 22 bp, synthetic construct
  misc_feature 1..22: note = Synthetic construct
  source 1..22: mol_type = other DNA
aagcctgtggacgcgagttaga

SEQ ID NO: 17133 - DNA, 22 bp, synthetic construct
  misc_feature 1..22: note = Synthetic construct
  source 1..22: mol_type = other DNA
aagcctgtgtacgcgagttaga

SEQ ID NO: 17134 - DNA, 22 bp, synthetic construct
  misc_feature 1..22: note = Synthetic construct
  source 1..22: mol_type = other DNA
aagcctgtgaccgcgagttaga

SEQ ID NO: 17135 - DNA, 22 bp, synthetic construct
  misc_feature 1..22: note = Synthetic construct
  source 1..22: mol_type = other DNA
aagcctgtgagcgcgagttaga

SEQ ID NO: 17136 - DNA, 22 bp, synthetic construct
  misc_feature 1..22: note = Synthetic construct
  source 1..22: mol_type = other DNA
aagcctgtgatcgcgagttaga

SEQ ID NO: 17137 - DNA, 22 bp, synthetic construct
  misc_feature 1..22: note = Synthetic construct
  source 1..22: mol_type = other DNA
aagcctgtgaaagcgagttaga

SEQ ID NO: 17138 - DNA, 22 bp, synthetic construct
  misc_feature 1..22: note = Synthetic construct
  source 1..22: mol_type = other DNA
aagcctgtgaaggcgagttaga

SEQ ID NO: 17139 - DNA, 22 bp, synthetic construct
  misc_feature 1..22: note = Synthetic construct
  source 1..22: mol_type = other DNA
aagcctgtgaatgcgagttaga

SEQ ID NO: 17140 - DNA, 22 bp, synthetic construct
  misc_feature 1..22: note = Synthetic construct
  source 1..22: mol_type = other DNA
aagcctgtgaacacgagttaga

SEQ ID NO: 17141 - DNA, 22 bp, synthetic construct
  misc_feature 1..22: note = Synthetic construct
  source 1..22: mol_type = other DNA
aagcctgtgaacccgagttaga

SEQ ID NO: 17142 - DNA, 22 bp, synthetic construct
  misc_feature 1..22: note = Synthetic construct
  source 1..22: mol_type = other DNA
aagcctgtgaactcgagttaga

SEQ ID NO: 17143 - DNA, 22 bp, synthetic construct
  misc_feature 1..22: note = Synthetic construct
  source 1..22: mol_type = other DNA
aagcctgtgaacgagagttaga

SEQ ID NO: 17144 - DNA, 22 bp, synthetic construct
  misc_feature 1..22: note = Synthetic construct
  source 1..22: mol_type = other DNA
aagcctgtgaacgggagttaga

SEQ ID NO: 17145 - DNA, 22 bp, synthetic construct
  misc_feature 1..22: note = Synthetic construct
  source 1..22: mol_type = other DNA
aagcctgtgaacgtgagttaga

SEQ ID NO: 17146 - DNA, 22 bp, synthetic construct
  misc_feature 1..22: note = Synthetic construct
  source 1..22: mol_type = other DNA
aagcctgtgaacgcaagttaga

SEQ ID NO: 17147 - DNA, 22 bp, synthetic construct
  misc_feature 1..22: note = Synthetic construct
  source 1..22: mol_type = other DNA
aagcctgtgaacgccagttaga

SEQ ID NO: 17148 - DNA, 22 bp, synthetic construct
  misc_feature 1..22: note = Synthetic construct
  source 1..22: mol_type = other DNA
aagcctgtgaacgctagttaga

SEQ ID NO: 17149 - DNA, 22 bp, synthetic construct
  misc_feature 1..22: note = Synthetic construct
  source 1..22: mol_type = other DNA
aagcctgtgaacgcgcgttaga

SEQ ID NO: 17150 - DNA, 22 bp, synthetic construct
  misc_feature 1..22: note = Synthetic construct
  source 1..22: mol_type = other DNA
aagcctgtgaacgcgggttaga

SEQ ID NO: 17151 - DNA, 22 bp, synthetic construct
  misc_feature 1..22: note = Synthetic construct
  source 1..22: mol_type = other DNA
aagcctgtgaacgcgtgttaga

SEQ ID NO: 17152 - DNA, 22 bp, synthetic construct
  misc_feature 1..22: note = Synthetic construct
  source 1..22: mol_type = other DNA
aagcctgtgaacgcgaattaga

SEQ ID NO: 17153 - DNA, 22 bp, synthetic construct
  misc_feature 1..22: note = Synthetic construct
  source 1..22: mol_type = other DNA
aagcctgtgaacgcgacttaga

SEQ ID NO: 17154 - DNA, 22 bp, synthetic construct
  misc_feature 1..22: note = Synthetic construct
  source 1..22: mol_type = other DNA
aagcctgtgaacgcgatttaga

SEQ ID NO: 17155 - DNA, 22 bp, synthetic construct
  misc_feature 1..22: note = Synthetic construct
  source 1..22: mol_type = other DNA
aagcctgtgaacgcgagataga

SEQ ID NO: 17156 - DNA, 22 bp, synthetic construct
  misc_feature 1..22: note = Synthetic construct
  source 1..22: mol_type = other DNA
aagcctgtgaacgcgagctaga

SEQ ID NO: 17157 - DNA, 22 bp, synthetic construct
  misc_feature 1..22: note = Synthetic construct
  source 1..22: mol_type = other DNA
aagcctgtgaacgcgaggtaga

SEQ ID NO: 17158 - DNA, 22 bp, synthetic construct
  misc_feature 1..22: note = Synthetic construct
  source 1..22: mol_type = other DNA
aagcctgtgaacgcgagtaaga

SEQ ID NO: 17159 - DNA, 22 bp, synthetic construct
  misc_feature 1..22: note = Synthetic construct
  source 1..22: mol_type = other DNA
aagcctgtgaacgcgagtcaga

SEQ ID NO: 17160 - DNA, 22 bp, synthetic construct
  misc_feature 1..22: note = Synthetic construct
  source 1..22: mol_type = other DNA
aagcctgtgaacgcgagtgaga

SEQ ID NO: 17161 - DNA, 22 bp, synthetic construct
  misc_feature 1..22: note = Synthetic construct
  source 1..22: mol_type = other DNA
aagcctgtgaacgcgagttcga

SEQ ID NO: 17162 - DNA, 22 bp, synthetic construct
  misc_feature 1..22: note = Synthetic construct
  source 1..22: mol_type = other DNA
aagcctgtgaacgcgagttgga

SEQ ID NO: 17163 - DNA, 22 bp, synthetic construct
  misc_feature 1..22: note = Synthetic construct
  source 1..22: mol_type = other DNA
aagcctgtgaacgcgagtttga

SEQ ID NO: 17164 - DNA, 22 bp, synthetic construct
  misc_feature 1..22: note = Synthetic construct
  source 1..22: mol_type = other DNA
aagcctgtgaacgcgagttaaa

SEQ ID NO: 17165 - DNA, 22 bp, synthetic construct
  misc_feature 1..22: note = Synthetic construct
  source 1..22: mol_type = other DNA
aagcctgtgaacgcgagttaca

SEQ ID NO: 17166 - DNA, 22 bp, synthetic construct
  misc_feature 1..22: note = Synthetic construct
  source 1..22: mol_type = other DNA
aagcctgtgaacgcgagttata

SEQ ID NO: 17167 - DNA, 22 bp, synthetic construct
  misc_feature 1..22: note = Synthetic construct
  source 1..22: mol_type = other DNA
aagcctgtgaacgcgagttagc

SEQ ID NO: 17168 - DNA, 22 bp, synthetic construct
  misc_feature 1..22: note = Synthetic construct
  source 1..22: mol_type = other DNA
aagcctgtgaacgcgagttagg

SEQ ID NO: 17169 - DNA, 22 bp, synthetic construct
  misc_feature 1..22: note = Synthetic construct
  source 1..22: mol_type = other DNA
aagcctgtgaacgcgagttagt

SEQ ID NO: 17170 - DNA, 20 bp, synthetic construct
  misc_feature 1..20: note = Synthetic construct
  source 1..20: mol_type = other DNA
agcaacgttctgcggcactt

SEQ ID NO: 17171 - DNA, 20 bp, synthetic construct
  misc_feature 1..20: note = Synthetic construct
  source 1..20: mol_type = other DNA
ggcaacgttctgcggcactt

SEQ ID NO: 17172 - DNA, 20 bp, synthetic construct
  misc_feature 1..20: note = Synthetic construct
  source 1..20: mol_type = other DNA
tgcaacgttctgcggcactt

SEQ ID NO: 17173 - DNA, 20 bp, synthetic construct
  misc_feature 1..20: note = Synthetic construct
  source 1..20: mol_type = other DNA
cacaacgttctgcggcactt

SEQ ID NO: 17174 - DNA, 20 bp, synthetic construct
  misc_feature 1..20: note = Synthetic construct
  source 1..20: mol_type = other DNA
cccaacgttctgcggcactt

SEQ ID NO: 17175 - DNA, 20 bp, synthetic construct
  misc_feature 1..20: note = Synthetic construct
  source 1..20: mol_type = other DNA
ctcaacgttctgcggcactt

SEQ ID NO: 17176 - DNA, 20 bp, synthetic construct
  misc_feature 1..20: note = Synthetic construct
  source 1..20: mol_type = other DNA
cgaaacgttctgcggcactt

SEQ ID NO: 17177 - DNA, 20 bp, synthetic construct
  misc_feature 1..20: note = Synthetic construct
  source 1..20: mol_type = other DNA
cggaacgttctgcggcactt

SEQ ID NO: 17178 - DNA, 20 bp, synthetic construct
  misc_feature 1..20: note = Synthetic construct
  source 1..20: mol_type = other DNA
cgtaacgttctgcggcactt

SEQ ID NO: 17179 - DNA, 20 bp, synthetic construct
  misc_feature 1..20: note = Synthetic construct
  source 1..20: mol_type = other DNA
cgccacgttctgcggcactt

SEQ ID NO: 17180 - DNA, 20 bp, synthetic construct
  misc_feature 1..20: note = Synthetic construct
  source 1..20: mol_type = other DNA
cgcgacgttctgcggcactt

SEQ ID NO: 17181 - DNA, 20 bp, synthetic construct
  misc_feature 1..20: note = Synthetic construct
  source 1..20: mol_type = other DNA
cgctacgttctgcggcactt

SEQ ID NO: 17182 - DNA, 20 bp, synthetic construct
  misc_feature 1..20: note = Synthetic construct
  source 1..20: mol_type = other DNA
cgcaccgttctgcggcactt

SEQ ID NO: 17183 - DNA, 20 bp, synthetic construct
  misc_feature 1..20: note = Synthetic construct
  source 1..20: mol_type = other DNA
cgcagcgttctgcggcactt

SEQ ID NO: 17184 - DNA, 20 bp, synthetic construct
  misc_feature 1..20: note = Synthetic construct
  source 1..20: mol_type = other DNA
cgcatcgttctgcggcactt

SEQ ID NO: 17185 - DNA, 20 bp, synthetic construct
  misc_feature 1..20: note = Synthetic construct
  source 1..20: mol_type = other DNA
cgcaaagttctgcggcactt

SEQ ID NO: 17186 - DNA, 20 bp, synthetic construct
  misc_feature 1..20: note = Synthetic construct
  source 1..20: mol_type = other DNA
cgcaaggttctgcggcactt

SEQ ID NO: 17187 - DNA, 20 bp, synthetic construct
  misc_feature 1..20: note = Synthetic construct
  source 1..20: mol_type = other DNA
cgcaatgttctgcggcactt

SEQ ID NO: 17188 - DNA, 20 bp, synthetic construct
  misc_feature 1..20: note = Synthetic construct
  source 1..20: mol_type = other DNA
cgcaacattctgcggcactt

SEQ ID NO: 17189 - DNA, 20 bp, synthetic construct
  misc_feature 1..20: note = Synthetic construct
  source 1..20: mol_type = other DNA
cgcaaccttctgcggcactt

SEQ ID NO: 17190 - DNA, 20 bp, synthetic construct
  misc_feature 1..20: note = Synthetic construct
  source 1..20: mol_type = other DNA
cgcaactttctgcggcactt

SEQ ID NO: 17191 - DNA, 20 bp, synthetic construct
  misc_feature 1..20: note = Synthetic construct
  source 1..20: mol_type = other DNA
cgcaacgatctgcggcactt

SEQ ID NO: 17192 - DNA, 20 bp, synthetic construct
  misc_feature 1..20: note = Synthetic construct
  source 1..20: mol_type = other DNA
cgcaacgctctgcggcactt

SEQ ID NO: 17193 - DNA, 20 bp, synthetic construct
  misc_feature 1..20: note = Synthetic construct
  source 1..20: mol_type = other DNA
cgcaacggtctgcggcactt

SEQ ID NO: 17194 - DNA, 20 bp, synthetic construct
  misc_feature 1..20: note = Synthetic construct
  source 1..20: mol_type = other DNA
cgcaacgtactgcggcactt

SEQ ID NO: 17195 - DNA, 20 bp, synthetic construct
  misc_feature 1..20: note = Synthetic construct
  source 1..20: mol_type = other DNA
cgcaacgtcctgcggcactt

SEQ ID NO: 17196 - DNA, 20 bp, synthetic construct
  misc_feature 1..20: note = Synthetic construct
  source 1..20: mol_type = other DNA
cgcaacgtgctgcggcactt

SEQ ID NO: 17197 - DNA, 20 bp, synthetic construct
  misc_feature 1..20: note = Synthetic construct
  source 1..20: mol_type = other DNA
cgcaacgttatgcggcactt

SEQ ID NO: 17198 - DNA, 20 bp, synthetic construct
  misc_feature 1..20: note = Synthetic construct
  source 1..20: mol_type = other DNA
cgcaacgttgtgcggcactt

SEQ ID NO: 17199 - DNA, 20 bp, synthetic construct
  misc_feature 1..20: note = Synthetic construct
  source 1..20: mol_type = other DNA
cgcaacgttttgcggcactt

SEQ ID NO: 17200 - DNA, 20 bp, synthetic construct
  misc_feature 1..20: note = Synthetic construct
  source 1..20: mol_type = other DNA
cgcaacgttcagcggcactt

SEQ ID NO: 17201 - DNA, 20 bp, synthetic construct
  misc_feature 1..20: note = Synthetic construct
  source 1..20: mol_type = other DNA
cgcaacgttccgcggcactt

SEQ ID NO: 17202 - DNA, 20 bp, synthetic construct
  misc_feature 1..20: note = Synthetic construct
  source 1..20: mol_type = other DNA
cgcaacgttcggcggcactt

SEQ ID NO: 17203 - DNA, 20 bp, synthetic construct
  misc_feature 1..20: note = Synthetic construct
  source 1..20: mol_type = other DNA
cgcaacgttctacggcactt

SEQ ID NO: 17204 - DNA, 20 bp, synthetic construct
  misc_feature 1..20: note = Synthetic construct
  source 1..20: mol_type = other DNA
cgcaacgttctccggcactt

SEQ ID NO: 17205 - DNA, 20 bp, synthetic construct
  misc_feature 1..20: note = Synthetic construct
  source 1..20: mol_type = other DNA
cgcaacgttcttcggcactt

SEQ ID NO: 17206 - DNA, 20 bp, synthetic construct
  misc_feature 1..20: note = Synthetic construct
  source 1..20: mol_type = other DNA
cgcaacgttctgaggcactt

SEQ ID NO: 17207 - DNA, 20 bp, synthetic construct
  misc_feature 1..20: note = Synthetic construct
  source 1..20: mol_type = other DNA
cgcaacgttctggggcactt

SEQ ID NO: 17208 - DNA, 20 bp, synthetic construct
  misc_feature 1..20: note = Synthetic construct
  source 1..20: mol_type = other DNA
cgcaacgttctgtggcactt

SEQ ID NO: 17209 - DNA, 20 bp, synthetic construct
  misc_feature 1..20: note = Synthetic construct
  source 1..20: mol_type = other DNA
cgcaacgttctgcagcactt

SEQ ID NO: 17210 - DNA, 20 bp, synthetic construct
  misc_feature 1..20: note = Synthetic construct
  source 1..20: mol_type = other DNA
cgcaacgttctgccgcactt

SEQ ID NO: 17211 - DNA, 20 bp, synthetic construct
  misc_feature 1..20: note = Synthetic construct
  source 1..20: mol_type = other DNA
cgcaacgttctgctgcactt

SEQ ID NO: 17212 - DNA, 20 bp, synthetic construct
  misc_feature 1..20: note = Synthetic construct
  source 1..20: mol_type = other DNA
cgcaacgttctgcgacactt

SEQ ID NO: 17213 - DNA, 20 bp, synthetic construct
  misc_feature 1..20: note = Synthetic construct
  source 1..20: mol_type = other DNA
cgcaacgttctgcgccactt

SEQ ID NO: 17214 - DNA, 20 bp, synthetic construct
  misc_feature 1..20: note = Synthetic construct
  source 1..20: mol_type = other DNA
cgcaacgttctgcgtcactt

SEQ ID NO: 17215 - DNA, 20 bp, synthetic construct
  misc_feature 1..20: note = Synthetic construct
  source 1..20: mol_type = other DNA
cgcaacgttctgcggaactt

SEQ ID NO: 17216 - DNA, 20 bp, synthetic construct
  misc_feature 1..20: note = Synthetic construct
  source 1..20: mol_type = other DNA
cgcaacgttctgcgggactt

SEQ ID NO: 17217 - DNA, 20 bp, synthetic construct
  misc_feature 1..20: note = Synthetic construct
  source 1..20: mol_type = other DNA
cgcaacgttctgcggtactt

SEQ ID NO: 17218 - DNA, 20 bp, synthetic construct
  misc_feature 1..20: note = Synthetic construct
  source 1..20: mol_type = other DNA
cgcaacgttctgcggccctt

SEQ ID NO: 17219 - DNA, 20 bp, synthetic construct
  misc_feature 1..20: note = Synthetic construct
  source 1..20: mol_type = other DNA
cgcaacgttctgcggcgctt

SEQ ID NO: 17220 - DNA, 20 bp, synthetic construct
  misc_feature 1..20: note = Synthetic construct
  source 1..20: mol_type = other DNA
cgcaacgttctgcggctctt

SEQ ID NO: 17221 - DNA, 20 bp, synthetic construct
  misc_feature 1..20: note = Synthetic construct
  source 1..20: mol_type = other DNA
cgcaacgttctgcggcaatt

SEQ ID NO: 17222 - DNA, 20 bp, synthetic construct
  misc_feature 1..20: note = Synthetic construct
  source 1..20: mol_type = other DNA
cgcaacgttctgcggcagtt

SEQ ID NO: 17223 - DNA, 20 bp, synthetic construct
  misc_feature 1..20: note = Synthetic construct
  source 1..20: mol_type = other DNA
cgcaacgttctgcggcattt

SEQ ID NO: 17224 - DNA, 20 bp, synthetic construct
  misc_feature 1..20: note = Synthetic construct
  source 1..20: mol_type = other DNA
cgcaacgttctgcggcacat

SEQ ID NO: 17225 - DNA, 20 bp, synthetic construct
  misc_feature 1..20: note = Synthetic construct
  source 1..20: mol_type = other DNA
cgcaacgttctgcggcacct

SEQ ID NO: 17226 - DNA, 20 bp, synthetic construct
  misc_feature 1..20: note = Synthetic construct
  source 1..20: mol_type = other DNA
cgcaacgttctgcggcacgt

SEQ ID NO: 17227 - DNA, 20 bp, synthetic construct
  misc_feature 1..20: note = Synthetic construct
  source 1..20: mol_type = other DNA
cgcaacgttctgcggcacta

SEQ ID NO: 17228 - DNA, 20 bp, synthetic construct
  misc_feature 1..20: note = Synthetic construct
  source 1..20: mol_type = other DNA
cgcaacgttctgcggcactc

SEQ ID NO: 17229 - DNA, 20 bp, synthetic construct
  misc_feature 1..20: note = Synthetic construct
  source 1..20: mol_type = other DNA
cgcaacgttctgcggcactg

SEQ ID NO: 17230 - DNA, 23 bp, synthetic construct
  misc_feature 1..23: note = Synthetic construct
  source 1..23: mol_type = other DNA
atcaaatgtgaacccatttccca

SEQ ID NO: 17231 - DNA, 23 bp, synthetic construct
  misc_feature 1..23: note = Synthetic construct
  source 1..23: mol_type = other DNA
gtcaaatgtgaacccatttccca

SEQ ID NO: 17232 - DNA, 23 bp, synthetic construct
  misc_feature 1..23: note = Synthetic construct
  source 1..23: mol_type = other DNA
ttcaaatgtgaacccatttccca

SEQ ID NO: 17233 - DNA, 23 bp, synthetic construct
  misc_feature 1..23: note = Synthetic construct
  source 1..23: mol_type = other DNA
cacaaatgtgaacccatttccca

SEQ ID NO: 17234 - DNA, 23 bp, synthetic construct
  misc_feature 1..23: note = Synthetic construct
  source 1..23: mol_type = other DNA
cccaaatgtgaacccatttccca

SEQ ID NO: 17235 - DNA, 23 bp, synthetic construct
  misc_feature 1..23: note = Synthetic construct
  source 1..23: mol_type = other DNA
cgcaaatgtgaacccatttccca

SEQ ID NO: 17236 - DNA, 23 bp, synthetic construct
  misc_feature 1..23: note = Synthetic construct
  source 1..23: mol_type = other DNA
ctaaaatgtgaacccatttccca

SEQ ID NO: 17237 - DNA, 23 bp, synthetic construct
  misc_feature 1..23: note = Synthetic construct
  source 1..23: mol_type = other DNA
ctgaaatgtgaacccatttccca

SEQ ID NO: 17238 - DNA, 23 bp, synthetic construct
  misc_feature 1..23: note = Synthetic construct
  source 1..23: mol_type = other DNA
cttaaatgtgaacccatttccca

SEQ ID NO: 17239 - DNA, 23 bp, synthetic construct
  misc_feature 1..23: note = Synthetic construct
  source 1..23: mol_type = other DNA
ctccaatgtgaacccatttccca

SEQ ID NO: 17240 - DNA, 23 bp, synthetic construct
  misc_feature 1..23: note = Synthetic construct
  source 1..23: mol_type = other DNA
ctcgaatgtgaacccatttccca

SEQ ID NO: 17241 - DNA, 23 bp, synthetic construct
  misc_feature 1..23: note = Synthetic construct
  source 1..23: mol_type = other DNA
ctctaatgtgaacccatttccca

SEQ ID NO: 17242 - DNA, 23 bp, synthetic construct
  misc_feature 1..23: note = Synthetic construct
  source 1..23: mol_type = other DNA
ctcacatgtgaacccatttccca

SEQ ID NO: 17243 - DNA, 23 bp, synthetic construct
  misc_feature 1..23: note = Synthetic construct
  source 1..23: mol_type = other DNA
ctcagatgtgaacccatttccca

SEQ ID NO: 17244 - DNA, 23 bp, synthetic construct
  misc_feature 1..23: note = Synthetic construct
  source 1..23: mol_type = other DNA
ctcatatgtgaacccatttccca

SEQ ID NO: 17245 - DNA, 23 bp, synthetic construct
  misc_feature 1..23: note = Synthetic construct
  source 1..23: mol_type = other DNA
ctcaactgtgaacccatttccca

SEQ ID NO: 17246 - DNA, 23 bp, synthetic construct
  misc_feature 1..23: note = Synthetic construct
  source 1..23: mol_type = other DNA
ctcaagtgtgaacccatttccca

SEQ ID NO: 17247 - DNA, 23 bp, synthetic construct
  misc_feature 1..23: note = Synthetic construct
  source 1..23: mol_type = other DNA
ctcaattgtgaacccatttccca

SEQ ID NO: 17248 - DNA, 23 bp, synthetic construct
  misc_feature 1..23: note = Synthetic construct
  source 1..23: mol_type = other DNA
ctcaaaagtgaacccatttccca

SEQ ID NO: 17249 - DNA, 23 bp, synthetic construct
  misc_feature 1..23: note = Synthetic construct
  source 1..23: mol_type = other DNA
ctcaaacgtgaacccatttccca

SEQ ID NO: 17250 - DNA, 23 bp, synthetic construct
  misc_feature 1..23: note = Synthetic construct
  source 1..23: mol_type = other DNA
ctcaaaggtgaacccatttccca

SEQ ID NO: 17251 - DNA, 23 bp, synthetic construct
  misc_feature 1..23: note = Synthetic construct
  source 1..23: mol_type = other DNA
ctcaaatatgaacccatttccca

SEQ ID NO: 17252 - DNA, 23 bp, synthetic construct
  misc_feature 1..23: note = Synthetic construct
  source 1..23: mol_type = other DNA
ctcaaatctgaacccatttccca

SEQ ID NO: 17253 - DNA, 23 bp, synthetic construct
  misc_feature 1..23: note = Synthetic construct
  source 1..23: mol_type = other DNA
ctcaaatttgaacccatttccca

SEQ ID NO: 17254 - DNA, 23 bp, synthetic construct
  misc_feature 1..23: note = Synthetic construct
  source 1..23: mol_type = other DNA
ctcaaatgagaacccatttccca

SEQ ID NO: 17255 - DNA, 23 bp, synthetic construct
  misc_feature 1..23: note = Synthetic construct
  source 1..23: mol_type = other DNA
ctcaaatgcgaacccatttccca

SEQ ID NO: 17256 - DNA, 23 bp, synthetic construct
  misc_feature 1..23: note = Synthetic construct
  source 1..23: mol_type = other DNA
ctcaaatgggaacccatttccca

SEQ ID NO: 17257 - DNA, 23 bp, synthetic construct
  misc_feature 1..23: note = Synthetic construct
  source 1..23: mol_type = other DNA
ctcaaatgtaaacccatttccca

SEQ ID NO: 17258 - DNA, 23 bp, synthetic construct
  misc_feature 1..23: note = Synthetic construct
  source 1..23: mol_type = other DNA
ctcaaatgtcaacccatttccca

SEQ ID NO: 17259 - DNA, 23 bp, synthetic construct
  misc_feature 1..23: note = Synthetic construct
  source 1..23: mol_type = other DNA
ctcaaatgttaacccatttccca

SEQ ID NO: 17260 - DNA, 23 bp, synthetic construct
  misc_feature 1..23: note = Synthetic construct
  source 1..23: mol_type = other DNA
ctcaaatgtgcacccatttccca

SEQ ID NO: 17261 - DNA, 23 bp, synthetic construct
  misc_feature 1..23: note = Synthetic construct
  source 1..23: mol_type = other DNA
ctcaaatgtggacccatttccca

SEQ ID NO: 17262 - DNA, 23 bp, synthetic construct
  misc_feature 1..23: note = Synthetic construct
  source 1..23: mol_type = other DNA
ctcaaatgtgtacccatttccca

SEQ ID NO: 17263 - DNA, 23 bp, synthetic construct
  misc_feature 1..23: note = Synthetic construct
  source 1..23: mol_type = other DNA
ctcaaatgtgaccccatttccca

SEQ ID NO: 17264 - DNA, 23 bp, synthetic construct
  misc_feature 1..23: note = Synthetic construct
  source 1..23: mol_type = other DNA
ctcaaatgtgagcccatttccca

SEQ ID NO: 17265 - DNA, 23 bp, synthetic construct
  misc_feature 1..23: note = Synthetic construct
  source 1..23: mol_type = other DNA
ctcaaatgtgatcccatttccca

SEQ ID NO: 17266 - DNA, 23 bp, synthetic construct
  misc_feature 1..23: note = Synthetic construct
  source 1..23: mol_type = other DNA
ctcaaatgtgaaaccatttccca

SEQ ID NO: 17267 - DNA, 23 bp, synthetic construct
  misc_feature 1..23: note = Synthetic construct
  source 1..23: mol_type = other DNA
ctcaaatgtgaagccatttccca

SEQ ID NO: 17268 - DNA, 23 bp, synthetic construct
  misc_feature 1..23: note = Synthetic construct
  source 1..23: mol_type = other DNA
ctcaaatgtgaatccatttccca

SEQ ID NO: 17269 - DNA, 23 bp, synthetic construct
  misc_feature 1..23: note = Synthetic construct
  source 1..23: mol_type = other DNA
ctcaaatgtgaacacatttccca

SEQ ID NO: 17270 - DNA, 23 bp, synthetic construct
  misc_feature 1..23: note = Synthetic construct
  source 1..23: mol_type = other DNA
ctcaaatgtgaacgcatttccca

SEQ ID NO: 17271 - DNA, 23 bp, synthetic construct
  misc_feature 1..23: note = Synthetic construct
  source 1..23: mol_type = other DNA
ctcaaatgtgaactcatttccca

SEQ ID NO: 17272 - DNA, 23 bp, synthetic construct
  misc_feature 1..23: note = Synthetic construct
  source 1..23: mol_type = other DNA
ctcaaatgtgaaccaatttccca

SEQ ID NO: 17273 - DNA, 23 bp, synthetic construct
  misc_feature 1..23: note = Synthetic construct
  source 1..23: mol_type = other DNA
ctcaaatgtgaaccgatttccca

SEQ ID NO: 17274 - DNA, 23 bp, synthetic construct
  misc_feature 1..23: note = Synthetic construct
  source 1..23: mol_type = other DNA
ctcaaatgtgaacctatttccca

SEQ ID NO: 17275 - DNA, 23 bp, synthetic construct
  misc_feature 1..23: note = Synthetic construct
  source 1..23: mol_type = other DNA
ctcaaatgtgaacccctttccca

SEQ ID NO: 17276 - DNA, 23 bp, synthetic construct
  misc_feature 1..23: note = Synthetic construct
  source 1..23: mol_type = other DNA
ctcaaatgtgaacccgtttccca

SEQ ID NO: 17277 - DNA, 23 bp, synthetic construct
  misc_feature 1..23: note = Synthetic construct
  source 1..23: mol_type = other DNA
ctcaaatgtgaacccttttccca

SEQ ID NO: 17278 - DNA, 23 bp, synthetic construct
  misc_feature 1..23: note = Synthetic construct
  source 1..23: mol_type = other DNA
ctcaaatgtgaacccaattccca

SEQ ID NO: 17279 - DNA, 23 bp, synthetic construct
  misc_feature 1..23: note = Synthetic construct
  source 1..23: mol_type = other DNA
ctcaaatgtgaacccacttccca

SEQ ID NO: 17280 - DNA, 23 bp, synthetic construct
  misc_feature 1..23: note = Synthetic construct
  source 1..23: mol_type = other DNA
ctcaaatgtgaacccagttccca

SEQ ID NO: 17281 - DNA, 23 bp, synthetic construct
  misc_feature 1..23: note = Synthetic construct
  source 1..23: mol_type = other DNA
ctcaaatgtgaacccatatccca

SEQ ID NO: 17282 - DNA, 23 bp, synthetic construct
  misc_feature 1..23: note = Synthetic construct
  source 1..23: mol_type = other DNA
ctcaaatgtgaacccatctccca

SEQ ID NO: 17283 - DNA, 23 bp, synthetic construct
  misc_feature 1..23: note = Synthetic construct
  source 1..23: mol_type = other DNA
ctcaaatgtgaacccatgtccca

SEQ ID NO: 17284 - DNA, 23 bp, synthetic construct
  misc_feature 1..23: note = Synthetic construct
  source 1..23: mol_type = other DNA
ctcaaatgtgaacccattaccca

SEQ ID NO: 17285 - DNA, 23 bp, synthetic construct
  misc_feature 1..23: note = Synthetic construct
  source 1..23: mol_type = other DNA
ctcaaatgtgaacccattcccca

SEQ ID NO: 17286 - DNA, 23 bp, synthetic construct
  misc_feature 1..23: note = Synthetic construct
  source 1..23: mol_type = other DNA
ctcaaatgtgaacccattgccca

SEQ ID NO: 17287 - DNA, 23 bp, synthetic construct
  misc_feature 1..23: note = Synthetic construct
  source 1..23: mol_type = other DNA
ctcaaatgtgaacccatttacca

SEQ ID NO: 17288 - DNA, 23 bp, synthetic construct
  misc_feature 1..23: note = Synthetic construct
  source 1..23: mol_type = other DNA
ctcaaatgtgaacccatttgcca

SEQ ID NO: 17289 - DNA, 23 bp, synthetic construct
  misc_feature 1..23: note = Synthetic construct
  source 1..23: mol_type = other DNA
ctcaaatgtgaacccattttcca

SEQ ID NO: 17290 - DNA, 23 bp, synthetic construct
  misc_feature 1..23: note = Synthetic construct
  source 1..23: mol_type = other DNA
ctcaaatgtgaacccatttcaca

SEQ ID NO: 17291 - DNA, 23 bp, synthetic construct
  misc_feature 1..23: note = Synthetic construct
  source 1..23: mol_type = other DNA
ctcaaatgtgaacccatttcgca

SEQ ID NO: 17292 - DNA, 23 bp, synthetic construct
  misc_feature 1..23: note = Synthetic construct
  source 1..23: mol_type = other DNA
ctcaaatgtgaacccatttctca

SEQ ID NO: 17293 - DNA, 23 bp, synthetic construct
  misc_feature 1..23: note = Synthetic construct
  source 1..23: mol_type = other DNA
ctcaaatgtgaacccatttccaa

SEQ ID NO: 17294 - DNA, 23 bp, synthetic construct
  misc_feature 1..23: note = Synthetic construct
  source 1..23: mol_type = other DNA
ctcaaatgtgaacccatttccga

SEQ ID NO: 17295 - DNA, 23 bp, synthetic construct
  misc_feature 1..23: note = Synthetic construct
  source 1..23: mol_type = other DNA
ctcaaatgtgaacccatttccta

SEQ ID NO: 17296 - DNA, 23 bp, synthetic construct
  misc_feature 1..23: note = Synthetic construct
  source 1..23: mol_type = other DNA
ctcaaatgtgaacccatttcccc

SEQ ID NO: 17297 - DNA, 23 bp, synthetic construct
  misc_feature 1..23: note = Synthetic construct
  source 1..23: mol_type = other DNA
ctcaaatgtgaacccatttcccg

SEQ ID NO: 17298 - DNA, 23 bp, synthetic construct
  misc_feature 1..23: note = Synthetic construct
  source 1..23: mol_type = other DNA
ctcaaatgtgaacccatttccct

SEQ ID NO: 17299 - DNA, 23 bp, synthetic construct
  misc_feature 1..23: note = Synthetic construct
  source 1..23: mol_type = other DNA
agaacgttttacgaagattcggt

SEQ ID NO: 17300 - DNA, 23 bp, synthetic construct
  misc_feature 1..23: note = Synthetic construct
  source 1..23: mol_type = other DNA
ggaacgttttacgaagattcggt

SEQ ID NO: 17301 - DNA, 23 bp, synthetic construct
  misc_feature 1..23: note = Synthetic construct
  source 1..23: mol_type = other DNA
tgaacgttttacgaagattcggt

SEQ ID NO: 17302 - DNA, 23 bp, synthetic construct
  misc_feature 1..23: note = Synthetic construct
  source 1..23: mol_type = other DNA
caaacgttttacgaagattcggt

SEQ ID NO: 17303 - DNA, 23 bp, synthetic construct
  misc_feature 1..23: note = Synthetic construct
  source 1..23: mol_type = other DNA
ccaacgttttacgaagattcggt

SEQ ID NO: 17304 - DNA, 23 bp, synthetic construct
  misc_feature 1..23: note = Synthetic construct
  source 1..23: mol_type = other DNA
ctaacgttttacgaagattcggt

SEQ ID NO: 17305 - DNA, 23 bp, synthetic construct
  misc_feature 1..23: note = Synthetic construct
  source 1..23: mol_type = other DNA
cgcacgttttacgaagattcggt

SEQ ID NO: 17306 - DNA, 23 bp, synthetic construct
  misc_feature 1..23: note = Synthetic construct
  source 1..23: mol_type = other DNA
cggacgttttacgaagattcggt

SEQ ID NO: 17307 - DNA, 23 bp, synthetic construct
  misc_feature 1..23: note = Synthetic construct
  source 1..23: mol_type = other DNA
cgtacgttttacgaagattcggt

SEQ ID NO: 17308 - DNA, 23 bp, synthetic construct
  misc_feature 1..23: note = Synthetic construct
  source 1..23: mol_type = other DNA
cgaccgttttacgaagattcggt

SEQ ID NO: 17309 - DNA, 23 bp, synthetic construct
  misc_feature 1..23: note = Synthetic construct
  source 1..23: mol_type = other DNA
cgagcgttttacgaagattcggt

SEQ ID NO: 17310 - DNA, 23 bp, synthetic construct
  misc_feature 1..23: note = Synthetic construct
  source 1..23: mol_type = other DNA
cgatcgttttacgaagattcggt

SEQ ID NO: 17311 - DNA, 23 bp, synthetic construct
  misc_feature 1..23: note = Synthetic construct
  source 1..23: mol_type = other DNA
cgaaagttttacgaagattcggt

SEQ ID NO: 17312 - DNA, 23 bp, synthetic construct
  misc_feature 1..23: note = Synthetic construct
  source 1..23: mol_type = other DNA
cgaaggttttacgaagattcggt

SEQ ID NO: 17313 - DNA, 23 bp, synthetic construct
  misc_feature 1..23: note = Synthetic construct
  source 1..23: mol_type = other DNA
cgaatgttttacgaagattcggt

SEQ ID NO: 17314 - DNA, 23 bp, synthetic construct
  misc_feature 1..23: note = Synthetic construct
  source 1..23: mol_type = other DNA
cgaacattttacgaagattcggt

SEQ ID NO: 17315 - DNA, 23 bp, synthetic construct
  misc_feature 1..23: note = Synthetic construct
  source 1..23: mol_type = other DNA
cgaaccttttacgaagattcggt

SEQ ID NO: 17316 - DNA, 23 bp, synthetic construct
  misc_feature 1..23: note = Synthetic construct
  source 1..23: mol_type = other DNA
cgaactttttacgaagattcggt

SEQ ID NO: 17317 - DNA, 23 bp, synthetic construct
  misc_feature 1..23: note = Synthetic construct
  source 1..23: mol_type = other DNA
cgaacgatttacgaagattcggt

SEQ ID NO: 17318 - DNA, 23 bp, synthetic construct
  misc_feature 1..23: note = Synthetic construct
  source 1..23: mol_type = other DNA
cgaacgctttacgaagattcggt

SEQ ID NO: 17319 - DNA, 23 bp, synthetic construct
  misc_feature 1..23: note = Synthetic construct
  source 1..23: mol_type = other DNA
cgaacggtttacgaagattcggt

SEQ ID NO: 17320 - DNA, 23 bp, synthetic construct
  misc_feature 1..23: note = Synthetic construct
  source 1..23: mol_type = other DNA
cgaacgtattacgaagattcggt

SEQ ID NO: 17321 - DNA, 23 bp, synthetic construct
  misc_feature 1..23: note = Synthetic construct
  source 1..23: mol_type = other DNA
cgaacgtcttacgaagattcggt

SEQ ID NO: 17322 - DNA, 23 bp, synthetic construct
  misc_feature 1..23: note = Synthetic construct
  source 1..23: mol_type = other DNA
cgaacgtgttacgaagattcggt

SEQ ID NO: 17323 - DNA, 23 bp, synthetic construct
  misc_feature 1..23: note = Synthetic construct
  source 1..23: mol_type = other DNA
cgaacgttatacgaagattcggt

SEQ ID NO: 17324 - DNA, 23 bp, synthetic construct
  misc_feature 1..23: note = Synthetic construct
  source 1..23: mol_type = other DNA
cgaacgttctacgaagattcggt

SEQ ID NO: 17325 - DNA, 23 bp, synthetic construct
  misc_feature 1..23: note = Synthetic construct
  source 1..23: mol_type = other DNA
cgaacgttgtacgaagattcggt

SEQ ID NO: 17326 - DNA, 23 bp, synthetic construct
  misc_feature 1..23: note = Synthetic construct
  source 1..23: mol_type = other DNA
cgaacgtttaacgaagattcggt

SEQ ID NO: 17327 - DNA, 23 bp, synthetic construct
  misc_feature 1..23: note = Synthetic construct
  source 1..23: mol_type = other DNA
cgaacgtttcacgaagattcggt

SEQ ID NO: 17328 - DNA, 23 bp, synthetic construct
  misc_feature 1..23: note = Synthetic construct
  source 1..23: mol_type = other DNA
cgaacgtttgacgaagattcggt

SEQ ID NO: 17329 - DNA, 23 bp, synthetic construct
  misc_feature 1..23: note = Synthetic construct
  source 1..23: mol_type = other DNA
cgaacgttttccgaagattcggt

SEQ ID NO: 17330 - DNA, 23 bp, synthetic construct
  misc_feature 1..23: note = Synthetic construct
  source 1..23: mol_type = other DNA
cgaacgttttgcgaagattcggt

SEQ ID NO: 17331 - DNA, 23 bp, synthetic construct
  misc_feature 1..23: note = Synthetic construct
  source 1..23: mol_type = other DNA
cgaacgtttttcgaagattcggt

SEQ ID NO: 17332 - DNA, 23 bp, synthetic construct
  misc_feature 1..23: note = Synthetic construct
  source 1..23: mol_type = other DNA
cgaacgttttaagaagattcggt

SEQ ID NO: 17333 - DNA, 23 bp, synthetic construct
  misc_feature 1..23: note = Synthetic construct
  source 1..23: mol_type = other DNA
cgaacgttttaggaagattcggt

SEQ ID NO: 17334 - DNA, 23 bp, synthetic construct
  misc_feature 1..23: note = Synthetic construct
  source 1..23: mol_type = other DNA
cgaacgttttatgaagattcggt

SEQ ID NO: 17335 - DNA, 23 bp, synthetic construct
  misc_feature 1..23: note = Synthetic construct
  source 1..23: mol_type = other DNA
cgaacgttttacaaagattcggt

SEQ ID NO: 17336 - DNA, 23 bp, synthetic construct
  misc_feature 1..23: note = Synthetic construct
  source 1..23: mol_type = other DNA
cgaacgttttaccaagattcggt

SEQ ID NO: 17337 - DNA, 23 bp, synthetic construct
  misc_feature 1..23: note = Synthetic construct
  source 1..23: mol_type = other DNA
cgaacgttttactaagattcggt

SEQ ID NO: 17338 - DNA, 23 bp, synthetic construct
  misc_feature 1..23: note = Synthetic construct
  source 1..23: mol_type = other DNA
cgaacgttttacgcagattcggt

SEQ ID NO: 17339 - DNA, 23 bp, synthetic construct
  misc_feature 1..23: note = Synthetic construct
  source 1..23: mol_type = other DNA
cgaacgttttacggagattcggt

SEQ ID NO: 17340 - DNA, 23 bp, synthetic construct
  misc_feature 1..23: note = Synthetic construct
  source 1..23: mol_type = other DNA
cgaacgttttacgtagattcggt

SEQ ID NO: 17341 - DNA, 23 bp, synthetic construct
  misc_feature 1..23: note = Synthetic construct
  source 1..23: mol_type = other DNA
cgaacgttttacgacgattcggt

SEQ ID NO: 17342 - DNA, 23 bp, synthetic construct
  misc_feature 1..23: note = Synthetic construct
  source 1..23: mol_type = other DNA
cgaacgttttacgaggattcggt

SEQ ID NO: 17343 - DNA, 23 bp, synthetic construct
  misc_feature 1..23: note = Synthetic construct
  source 1..23: mol_type = other DNA
cgaacgttttacgatgattcggt

SEQ ID NO: 17344 - DNA, 23 bp, synthetic construct
  misc_feature 1..23: note = Synthetic construct
  source 1..23: mol_type = other DNA
cgaacgttttacgaaaattcggt

SEQ ID NO: 17345 - DNA, 23 bp, synthetic construct
  misc_feature 1..23: note = Synthetic construct
  source 1..23: mol_type = other DNA
cgaacgttttacgaacattcggt

SEQ ID NO: 17346 - DNA, 23 bp, synthetic construct
  misc_feature 1..23: note = Synthetic construct
  source 1..23: mol_type = other DNA
cgaacgttttacgaatattcggt

SEQ ID NO: 17347 - DNA, 23 bp, synthetic construct
  misc_feature 1..23: note = Synthetic construct
  source 1..23: mol_type = other DNA
cgaacgttttacgaagcttcggt

SEQ ID NO: 17348 - DNA, 23 bp, synthetic construct
  misc_feature 1..23: note = Synthetic construct
  source 1..23: mol_type = other DNA
cgaacgttttacgaaggttcggt

SEQ ID NO: 17349 - DNA, 23 bp, synthetic construct
  misc_feature 1..23: note = Synthetic construct
  source 1..23: mol_type = other DNA
cgaacgttttacgaagtttcggt

SEQ ID NO: 17350 - DNA, 23 bp, synthetic construct
  misc_feature 1..23: note = Synthetic construct
  source 1..23: mol_type = other DNA
cgaacgttttacgaagaatcggt

SEQ ID NO: 17351 - DNA, 23 bp, synthetic construct
  misc_feature 1..23: note = Synthetic construct
  source 1..23: mol_type = other DNA
cgaacgttttacgaagactcggt

SEQ ID NO: 17352 - DNA, 23 bp, synthetic construct
  misc_feature 1..23: note = Synthetic construct
  source 1..23: mol_type = other DNA
cgaacgttttacgaagagtcggt

SEQ ID NO: 17353 - DNA, 23 bp, synthetic construct
  misc_feature 1..23: note = Synthetic construct
  source 1..23: mol_type = other DNA
cgaacgttttacgaagatacggt

SEQ ID NO: 17354 - DNA, 23 bp, synthetic construct
  misc_feature 1..23: note = Synthetic construct
  source 1..23: mol_type = other DNA
cgaacgttttacgaagatccggt

SEQ ID NO: 17355 - DNA, 23 bp, synthetic construct
  misc_feature 1..23: note = Synthetic construct
  source 1..23: mol_type = other DNA
cgaacgttttacgaagatgcggt

SEQ ID NO: 17356 - DNA, 23 bp, synthetic construct
  misc_feature 1..23: note = Synthetic construct
  source 1..23: mol_type = other DNA
cgaacgttttacgaagattaggt

SEQ ID NO: 17357 - DNA, 23 bp, synthetic construct
  misc_feature 1..23: note = Synthetic construct
  source 1..23: mol_type = other DNA
cgaacgttttacgaagattgggt

SEQ ID NO: 17358 - DNA, 23 bp, synthetic construct
  misc_feature 1..23: note = Synthetic construct
  source 1..23: mol_type = other DNA
cgaacgttttacgaagatttggt

SEQ ID NO: 17359 - DNA, 23 bp, synthetic construct
  misc_feature 1..23: note = Synthetic construct
  source 1..23: mol_type = other DNA
cgaacgttttacgaagattcagt

SEQ ID NO: 17360 - DNA, 23 bp, synthetic construct
  misc_feature 1..23: note = Synthetic construct
  source 1..23: mol_type = other DNA
cgaacgttttacgaagattccgt

SEQ ID NO: 17361 - DNA, 23 bp, synthetic construct
  misc_feature 1..23: note = Synthetic construct
  source 1..23: mol_type = other DNA
cgaacgttttacgaagattctgt

SEQ ID NO: 17362 - DNA, 23 bp, synthetic construct
  misc_feature 1..23: note = Synthetic construct
  source 1..23: mol_type = other DNA
cgaacgttttacgaagattcgat

SEQ ID NO: 17363 - DNA, 23 bp, synthetic construct
  misc_feature 1..23: note = Synthetic construct
  source 1..23: mol_type = other DNA
cgaacgttttacgaagattcgct

SEQ ID NO: 17364 - DNA, 23 bp, synthetic construct
  misc_feature 1..23: note = Synthetic construct
  source 1..23: mol_type = other DNA
cgaacgttttacgaagattcgtt

SEQ ID NO: 17365 - DNA, 23 bp, synthetic construct
  misc_feature 1..23: note = Synthetic construct
  source 1..23: mol_type = other DNA
cgaacgttttacgaagattcgga

SEQ ID NO: 17366 - DNA, 23 bp, synthetic construct
  misc_feature 1..23: note = Synthetic construct
  source 1..23: mol_type = other DNA
cgaacgttttacgaagattcggc

SEQ ID NO: 17367 - DNA, 23 bp, synthetic construct
  misc_feature 1..23: note = Synthetic construct
  source 1..23: mol_type = other DNA
cgaacgttttacgaagattcggg

SEQ ID NO: 17368 - DNA, 20 bp, synthetic construct
  misc_feature 1..20: note = Synthetic construct
  source 1..20: mol_type = other DNA
ccgaccgggagtccagttcg

SEQ ID NO: 17369 - DNA, 20 bp, synthetic construct
  misc_feature 1..20: note = Synthetic construct
  source 1..20: mol_type = other DNA
gcgaccgggagtccagttcg

SEQ ID NO: 17370 - DNA, 20 bp, synthetic construct
  misc_feature 1..20: note = Synthetic construct
  source 1..20: mol_type = other DNA
tcgaccgggagtccagttcg

SEQ ID NO: 17371 - DNA, 20 bp, synthetic construct
  misc_feature 1..20: note = Synthetic construct
  source 1..20: mol_type = other DNA
aagaccgggagtccagttcg

SEQ ID NO: 17372 - DNA, 20 bp, synthetic construct
  misc_feature 1..20: note = Synthetic construct
  source 1..20: mol_type = other DNA
aggaccgggagtccagttcg

SEQ ID NO: 17373 - DNA, 20 bp, synthetic construct
  misc_feature 1..20: note = Synthetic construct
  source 1..20: mol_type = other DNA
atgaccgggagtccagttcg

SEQ ID NO: 17374 - DNA, 20 bp, synthetic construct
  misc_feature 1..20: note = Synthetic construct
  source 1..20: mol_type = other DNA
acaaccgggagtccagttcg

SEQ ID NO: 17375 - DNA, 20 bp, synthetic construct
  misc_feature 1..20: note = Synthetic construct
  source 1..20: mol_type = other DNA
accaccgggagtccagttcg

SEQ ID NO: 17376 - DNA, 20 bp, synthetic construct
  misc_feature 1..20: note = Synthetic construct
  source 1..20: mol_type = other DNA
actaccgggagtccagttcg

SEQ ID NO: 17377 - DNA, 20 bp, synthetic construct
  misc_feature 1..20: note = Synthetic construct
  source 1..20: mol_type = other DNA
acgcccgggagtccagttcg

SEQ ID NO: 17378 - DNA, 20 bp, synthetic construct
  misc_feature 1..20: note = Synthetic construct
  source 1..20: mol_type = other DNA
acggccgggagtccagttcg

SEQ ID NO: 17379 - DNA, 20 bp, synthetic construct
  misc_feature 1..20: note = Synthetic construct
  source 1..20: mol_type = other DNA
acgtccgggagtccagttcg

SEQ ID NO: 17380 - DNA, 20 bp, synthetic construct
  misc_feature 1..20: note = Synthetic construct
  source 1..20: mol_type = other DNA
acgaacgggagtccagttcg

SEQ ID NO: 17381 - DNA, 20 bp, synthetic construct
  misc_feature 1..20: note = Synthetic construct
  source 1..20: mol_type = other DNA
acgagcgggagtccagttcg

SEQ ID NO: 17382 - DNA, 20 bp, synthetic construct
  misc_feature 1..20: note = Synthetic construct
  source 1..20: mol_type = other DNA
acgatcgggagtccagttcg

SEQ ID NO: 17383 - DNA, 20 bp, synthetic construct
  misc_feature 1..20: note = Synthetic construct
  source 1..20: mol_type = other DNA
acgacagggagtccagttcg

SEQ ID NO: 17384 - DNA, 20 bp, synthetic construct
  misc_feature 1..20: note = Synthetic construct
  source 1..20: mol_type = other DNA
acgacggggagtccagttcg

SEQ ID NO: 17385 - DNA, 20 bp, synthetic construct
  misc_feature 1..20: note = Synthetic construct
  source 1..20: mol_type = other DNA
acgactgggagtccagttcg

SEQ ID NO: 17386 - DNA, 20 bp, synthetic construct
  misc_feature 1..20: note = Synthetic construct
  source 1..20: mol_type = other DNA
acgaccaggagtccagttcg

SEQ ID NO: 17387 - DNA, 20 bp, synthetic construct
  misc_feature 1..20: note = Synthetic construct
  source 1..20: mol_type = other DNA
acgacccggagtccagttcg

SEQ ID NO: 17388 - DNA, 20 bp, synthetic construct
  misc_feature 1..20: note = Synthetic construct
  source 1..20: mol_type = other DNA
acgacctggagtccagttcg

SEQ ID NO: 17389 - DNA, 20 bp, synthetic construct
  misc_feature 1..20: note = Synthetic construct
  source 1..20: mol_type = other DNA
acgaccgagagtccagttcg

SEQ ID NO: 17390 - DNA, 20 bp, synthetic construct
  misc_feature 1..20: note = Synthetic construct
  source 1..20: mol_type = other DNA
acgaccgcgagtccagttcg

SEQ ID NO: 17391 - DNA, 20 bp, synthetic construct
  misc_feature 1..20: note = Synthetic construct
  source 1..20: mol_type = other DNA
acgaccgtgagtccagttcg

SEQ ID NO: 17392 - DNA, 20 bp, synthetic construct
  misc_feature 1..20: note = Synthetic construct
  source 1..20: mol_type = other DNA
acgaccggaagtccagttcg

SEQ ID NO: 17393 - DNA, 20 bp, synthetic construct
  misc_feature 1..20: note = Synthetic construct
  source 1..20: mol_type = other DNA
acgaccggcagtccagttcg

SEQ ID NO: 17394 - DNA, 20 bp, synthetic construct
  misc_feature 1..20: note = Synthetic construct
  source 1..20: mol_type = other DNA
acgaccggtagtccagttcg

SEQ ID NO: 17395 - DNA, 20 bp, synthetic construct
  misc_feature 1..20: note = Synthetic construct
  source 1..20: mol_type = other DNA
acgaccgggcgtccagttcg

SEQ ID NO: 17396 - DNA, 20 bp, synthetic construct
  misc_feature 1..20: note = Synthetic construct
  source 1..20: mol_type = other DNA
acgaccgggggtccagttcg

SEQ ID NO: 17397 - DNA, 20 bp, synthetic construct
  misc_feature 1..20: note = Synthetic construct
  source 1..20: mol_type = other DNA
acgaccgggtgtccagttcg

SEQ ID NO: 17398 - DNA, 20 bp, synthetic construct
  misc_feature 1..20: note = Synthetic construct
  source 1..20: mol_type = other DNA
acgaccgggaatccagttcg

SEQ ID NO: 17399 - DNA, 20 bp, synthetic construct
  misc_feature 1..20: note = Synthetic construct
  source 1..20: mol_type = other DNA
acgaccgggactccagttcg

SEQ ID NO: 17400 - DNA, 20 bp, synthetic construct
  misc_feature 1..20: note = Synthetic construct
  source 1..20: mol_type = other DNA
acgaccgggattccagttcg

SEQ ID NO: 17401 - DNA, 20 bp, synthetic construct
  misc_feature 1..20: note = Synthetic construct
  source 1..20: mol_type = other DNA
acgaccgggagaccagttcg

SEQ ID NO: 17402 - DNA, 20 bp, synthetic construct
  misc_feature 1..20: note = Synthetic construct
  source 1..20: mol_type = other DNA
acgaccgggagcccagttcg

SEQ ID NO: 17403 - DNA, 20 bp, synthetic construct
  misc_feature 1..20: note = Synthetic construct
  source 1..20: mol_type = other DNA
acgaccgggaggccagttcg

SEQ ID NO: 17404 - DNA, 20 bp, synthetic construct
  misc_feature 1..20: note = Synthetic construct
  source 1..20: mol_type = other DNA
acgaccgggagtacagttcg

SEQ ID NO: 17405 - DNA, 20 bp, synthetic construct
  misc_feature 1..20: note = Synthetic construct
  source 1..20: mol_type = other DNA
acgaccgggagtgcagttcg

SEQ ID NO: 17406 - DNA, 20 bp, synthetic construct
  misc_feature 1..20: note = Synthetic construct
  source 1..20: mol_type = other DNA
acgaccgggagttcagttcg

SEQ ID NO: 17407 - DNA, 20 bp, synthetic construct
  misc_feature 1..20: note = Synthetic construct
  source 1..20: mol_type = other DNA
acgaccgggagtcaagttcg

SEQ ID NO: 17408 - DNA, 20 bp, synthetic construct
  misc_feature 1..20: note = Synthetic construct
  source 1..20: mol_type = other DNA
acgaccgggagtcgagttcg

SEQ ID NO: 17409 - DNA, 20 bp, synthetic construct
  misc_feature 1..20: note = Synthetic construct
  source 1..20: mol_type = other DNA
acgaccgggagtctagttcg

SEQ ID NO: 17410 - DNA, 20 bp, synthetic construct
  misc_feature 1..20: note = Synthetic construct
  source 1..20: mol_type = other DNA
acgaccgggagtcccgttcg

SEQ ID NO: 17411 - DNA, 20 bp, synthetic construct
  misc_feature 1..20: note = Synthetic construct
  source 1..20: mol_type = other DNA
acgaccgggagtccggttcg

SEQ ID NO: 17412 - DNA, 20 bp, synthetic construct
  misc_feature 1..20: note = Synthetic construct
  source 1..20: mol_type = other DNA
acgaccgggagtcctgttcg

SEQ ID NO: 17413 - DNA, 20 bp, synthetic construct
  misc_feature 1..20: note = Synthetic construct
  source 1..20: mol_type = other DNA
acgaccgggagtccaattcg

SEQ ID NO: 17414 - DNA, 20 bp, synthetic construct
  misc_feature 1..20: note = Synthetic construct
  source 1..20: mol_type = other DNA
acgaccgggagtccacttcg

SEQ ID NO: 17415 - DNA, 20 bp, synthetic construct
  misc_feature 1..20: note = Synthetic construct
  source 1..20: mol_type = other DNA
acgaccgggagtccatttcg

SEQ ID NO: 17416 - DNA, 20 bp, synthetic construct
  misc_feature 1..20: note = Synthetic construct
  source 1..20: mol_type = other DNA
acgaccgggagtccagatcg

SEQ ID NO: 17417 - DNA, 20 bp, synthetic construct
  misc_feature 1..20: note = Synthetic construct
  source 1..20: mol_type = other DNA
acgaccgggagtccagctcg

SEQ ID NO: 17418 - DNA, 20 bp, synthetic construct
  misc_feature 1..20: note = Synthetic construct
  source 1..20: mol_type = other DNA
acgaccgggagtccaggtcg

SEQ ID NO: 17419 - DNA, 20 bp, synthetic construct
  misc_feature 1..20: note = Synthetic construct
  source 1..20: mol_type = other DNA
acgaccgggagtccagtacg

SEQ ID NO: 17420 - DNA, 20 bp, synthetic construct
  misc_feature 1..20: note = Synthetic construct
  source 1..20: mol_type = other DNA
acgaccgggagtccagtccg

SEQ ID NO: 17421 - DNA, 20 bp, synthetic construct
  misc_feature 1..20: note = Synthetic construct
  source 1..20: mol_type = other DNA
acgaccgggagtccagtgcg

SEQ ID NO: 17422 - DNA, 20 bp, synthetic construct
  misc_feature 1..20: note = Synthetic construct
  source 1..20: mol_type = other DNA
acgaccgggagtccagttag

SEQ ID NO: 17423 - DNA, 20 bp, synthetic construct
  misc_feature 1..20: note = Synthetic construct
  source 1..20: mol_type = other DNA
acgaccgggagtccagttgg

SEQ ID NO: 17424 - DNA, 20 bp, synthetic construct
  misc_feature 1..20: note = Synthetic construct
  source 1..20: mol_type = other DNA
acgaccgggagtccagtttg

SEQ ID NO: 17425 - DNA, 20 bp, synthetic construct
  misc_feature 1..20: note = Synthetic construct
  source 1..20: mol_type = other DNA
acgaccgggagtccagttca

SEQ ID NO: 17426 - DNA, 20 bp, synthetic construct
  misc_feature 1..20: note = Synthetic construct
  source 1..20: mol_type = other DNA
acgaccgggagtccagttcc

SEQ ID NO: 17427 - DNA, 20 bp, synthetic construct
  misc_feature 1..20: note = Synthetic construct
  source 1..20: mol_type = other DNA
acgaccgggagtccagttct

SEQ ID NO: 17428 - DNA, 22 bp, synthetic construct
  misc_feature 1..22: note = Synthetic construct
  source 1..22: mol_type = other DNA
atgggagaaaactccacaccag

SEQ ID NO: 17429 - DNA, 22 bp, synthetic construct
  misc_feature 1..22: note = Synthetic construct
  source 1..22: mol_type = other DNA
ctgggagaaaactccacaccag

SEQ ID NO: 17430 - DNA, 22 bp, synthetic construct
  misc_feature 1..22: note = Synthetic construct
  source 1..22: mol_type = other DNA
ttgggagaaaactccacaccag

SEQ ID NO: 17431 - DNA, 22 bp, synthetic construct
  misc_feature 1..22: note = Synthetic construct
  source 1..22: mol_type = other DNA
gagggagaaaactccacaccag

SEQ ID NO: 17432 - DNA, 22 bp, synthetic construct
  misc_feature 1..22: note = Synthetic construct
  source 1..22: mol_type = other DNA
gcgggagaaaactccacaccag

SEQ ID NO: 17433 - DNA, 22 bp, synthetic construct
  misc_feature 1..22: note = Synthetic construct
  source 1..22: mol_type = other DNA
gggggagaaaactccacaccag

SEQ ID NO: 17434 - DNA, 22 bp, synthetic construct
  misc_feature 1..22: note = Synthetic construct
  source 1..22: mol_type = other DNA
gtaggagaaaactccacaccag

SEQ ID NO: 17435 - DNA, 22 bp, synthetic construct
  misc_feature 1..22: note = Synthetic construct
  source 1..22: mol_type = other DNA
gtcggagaaaactccacaccag

SEQ ID NO: 17436 - DNA, 22 bp, synthetic construct
  misc_feature 1..22: note = Synthetic construct
  source 1..22: mol_type = other DNA
gttggagaaaactccacaccag

SEQ ID NO: 17437 - DNA, 22 bp, synthetic construct
  misc_feature 1..22: note = Synthetic construct
  source 1..22: mol_type = other DNA
gtgagagaaaactccacaccag

SEQ ID NO: 17438 - DNA, 22 bp, synthetic construct
  misc_feature 1..22: note = Synthetic construct
  source 1..22: mol_type = other DNA
gtgcgagaaaactccacaccag

SEQ ID NO: 17439 - DNA, 22 bp, synthetic construct
  misc_feature 1..22: note = Synthetic construct
  source 1..22: mol_type = other DNA
gtgtgagaaaactccacaccag

SEQ ID NO: 17440 - DNA, 22 bp, synthetic construct
  misc_feature 1..22: note = Synthetic construct
  source 1..22: mol_type = other DNA
gtggaagaaaactccacaccag

SEQ ID NO: 17441 - DNA, 22 bp, synthetic construct
  misc_feature 1..22: note = Synthetic construct
  source 1..22: mol_type = other DNA
gtggcagaaaactccacaccag

SEQ ID NO: 17442 - DNA, 22 bp, synthetic construct
  misc_feature 1..22: note = Synthetic construct
  source 1..22: mol_type = other DNA
gtggtagaaaactccacaccag

SEQ ID NO: 17443 - DNA, 22 bp, synthetic construct
  misc_feature 1..22: note = Synthetic construct
  source 1..22: mol_type = other DNA
gtgggcgaaaactccacaccag

SEQ ID NO: 17444 - DNA, 22 bp, synthetic construct
  misc_feature 1..22: note = Synthetic construct
  source 1..22: mol_type = other DNA
gtgggggaaaactccacaccag

SEQ ID NO: 17445 - DNA, 22 bp, synthetic construct
  misc_feature 1..22: note = Synthetic construct
  source 1..22: mol_type = other DNA
gtgggtgaaaactccacaccag

SEQ ID NO: 17446 - DNA, 22 bp, synthetic construct
  misc_feature 1..22: note = Synthetic construct
  source 1..22: mol_type = other DNA
gtgggaaaaaactccacaccag

SEQ ID NO: 17447 - DNA, 22 bp, synthetic construct
  misc_feature 1..22: note = Synthetic construct
  source 1..22: mol_type = other DNA
gtgggacaaaactccacaccag

SEQ ID NO: 17448 - DNA, 22 bp, synthetic construct
  misc_feature 1..22: note = Synthetic construct
  source 1..22: mol_type = other DNA
gtgggataaaactccacaccag

SEQ ID NO: 17449 - DNA, 22 bp, synthetic construct
  misc_feature 1..22: note = Synthetic construct
  source 1..22: mol_type = other DNA
gtgggagcaaactccacaccag

SEQ ID NO: 17450 - DNA, 22 bp, synthetic construct
  misc_feature 1..22: note = Synthetic construct
  source 1..22: mol_type = other DNA
gtgggaggaaactccacaccag

SEQ ID NO: 17451 - DNA, 22 bp, synthetic construct
  misc_feature 1..22: note = Synthetic construct
  source 1..22: mol_type = other DNA
gtgggagtaaactccacaccag

SEQ ID NO: 17452 - DNA, 22 bp, synthetic construct
  misc_feature 1..22: note = Synthetic construct
  source 1..22: mol_type = other DNA
gtgggagacaactccacaccag

SEQ ID NO: 17453 - DNA, 22 bp, synthetic construct
  misc_feature 1..22: note = Synthetic construct
  source 1..22: mol_type = other DNA
gtgggagagaactccacaccag

SEQ ID NO: 17454 - DNA, 22 bp, synthetic construct
  misc_feature 1..22: note = Synthetic construct
  source 1..22: mol_type = other DNA
gtgggagataactccacaccag

SEQ ID NO: 17455 - DNA, 22 bp, synthetic construct
  misc_feature 1..22: note = Synthetic construct
  source 1..22: mol_type = other DNA
gtgggagaacactccacaccag

SEQ ID NO: 17456 - DNA, 22 bp, synthetic construct
  misc_feature 1..22: note = Synthetic construct
  source 1..22: mol_type = other DNA
gtgggagaagactccacaccag

SEQ ID NO: 17457 - DNA, 22 bp, synthetic construct
  misc_feature 1..22: note = Synthetic construct
  source 1..22: mol_type = other DNA
gtgggagaatactccacaccag

SEQ ID NO: 17458 - DNA, 22 bp, synthetic construct
  misc_feature 1..22: note = Synthetic construct
  source 1..22: mol_type = other DNA
gtgggagaaacctccacaccag

SEQ ID NO: 17459 - DNA, 22 bp, synthetic construct
  misc_feature 1..22: note = Synthetic construct
  source 1..22: mol_type = other DNA
gtgggagaaagctccacaccag

SEQ ID NO: 17460 - DNA, 22 bp, synthetic construct
  misc_feature 1..22: note = Synthetic construct
  source 1..22: mol_type = other DNA
gtgggagaaatctccacaccag

SEQ ID NO: 17461 - DNA, 22 bp, synthetic construct
  misc_feature 1..22: note = Synthetic construct
  source 1..22: mol_type = other DNA
gtgggagaaaaatccacaccag

SEQ ID NO: 17462 - DNA, 22 bp, synthetic construct
  misc_feature 1..22: note = Synthetic construct
  source 1..22: mol_type = other DNA
gtgggagaaaagtccacaccag

SEQ ID NO: 17463 - DNA, 22 bp, synthetic construct
  misc_feature 1..22: note = Synthetic construct
  source 1..22: mol_type = other DNA
gtgggagaaaattccacaccag

SEQ ID NO: 17464 - DNA, 22 bp, synthetic construct
  misc_feature 1..22: note = Synthetic construct
  source 1..22: mol_type = other DNA
gtgggagaaaacaccacaccag

SEQ ID NO: 17465 - DNA, 22 bp, synthetic construct
  misc_feature 1..22: note = Synthetic construct
  source 1..22: mol_type = other DNA
gtgggagaaaaccccacaccag

SEQ ID NO: 17466 - DNA, 22 bp, synthetic construct
  misc_feature 1..22: note = Synthetic construct
  source 1..22: mol_type = other DNA
gtgggagaaaacgccacaccag

SEQ ID NO: 17467 - DNA, 22 bp, synthetic construct
  misc_feature 1..22: note = Synthetic construct
  source 1..22: mol_type = other DNA
gtgggagaaaactacacaccag

SEQ ID NO: 17468 - DNA, 22 bp, synthetic construct
  misc_feature 1..22: note = Synthetic construct
  source 1..22: mol_type = other DNA
gtgggagaaaactgcacaccag

SEQ ID NO: 17469 - DNA, 22 bp, synthetic construct
  misc_feature 1..22: note = Synthetic construct
  source 1..22: mol_type = other DNA
gtgggagaaaacttcacaccag

SEQ ID NO: 17470 - DNA, 22 bp, synthetic construct
  misc_feature 1..22: note = Synthetic construct
  source 1..22: mol_type = other DNA
gtgggagaaaactcaacaccag

SEQ ID NO: 17471 - DNA, 22 bp, synthetic construct
  misc_feature 1..22: note = Synthetic construct
  source 1..22: mol_type = other DNA
gtgggagaaaactcgacaccag

SEQ ID NO: 17472 - DNA, 22 bp, synthetic construct
  misc_feature 1..22: note = Synthetic construct
  source 1..22: mol_type = other DNA
gtgggagaaaactctacaccag

SEQ ID NO: 17473 - DNA, 22 bp, synthetic construct
  misc_feature 1..22: note = Synthetic construct
  source 1..22: mol_type = other DNA
gtgggagaaaactccccaccag

SEQ ID NO: 17474 - DNA, 22 bp, synthetic construct
  misc_feature 1..22: note = Synthetic construct
  source 1..22: mol_type = other DNA
gtgggagaaaactccgcaccag

SEQ ID NO: 17475 - DNA, 22 bp, synthetic construct
  misc_feature 1..22: note = Synthetic construct
  source 1..22: mol_type = other DNA
gtgggagaaaactcctcaccag

SEQ ID NO: 17476 - DNA, 22 bp, synthetic construct
  misc_feature 1..22: note = Synthetic construct
  source 1..22: mol_type = other DNA
gtgggagaaaactccaaaccag

SEQ ID NO: 17477 - DNA, 22 bp, synthetic construct
  misc_feature 1..22: note = Synthetic construct
  source 1..22: mol_type = other DNA
gtgggagaaaactccagaccag

SEQ ID NO: 17478 - DNA, 22 bp, synthetic construct
  misc_feature 1..22: note = Synthetic construct
  source 1..22: mol_type = other DNA
gtgggagaaaactccataccag

SEQ ID NO: 17479 - DNA, 22 bp, synthetic construct
  misc_feature 1..22: note = Synthetic construct
  source 1..22: mol_type = other DNA
gtgggagaaaactccaccccag

SEQ ID NO: 17480 - DNA, 22 bp, synthetic construct
  misc_feature 1..22: note = Synthetic construct
  source 1..22: mol_type = other DNA
gtgggagaaaactccacgccag

SEQ ID NO: 17481 - DNA, 22 bp, synthetic construct
  misc_feature 1..22: note = Synthetic construct
  source 1..22: mol_type = other DNA
gtgggagaaaactccactccag

SEQ ID NO: 17482 - DNA, 22 bp, synthetic construct
  misc_feature 1..22: note = Synthetic construct
  source 1..22: mol_type = other DNA
gtgggagaaaactccacaacag

SEQ ID NO: 17483 - DNA, 22 bp, synthetic construct
  misc_feature 1..22: note = Synthetic construct
  source 1..22: mol_type = other DNA
gtgggagaaaactccacagcag

SEQ ID NO: 17484 - DNA, 22 bp, synthetic construct
  misc_feature 1..22: note = Synthetic construct
  source 1..22: mol_type = other DNA
gtgggagaaaactccacatcag

SEQ ID NO: 17485 - DNA, 22 bp, synthetic construct
  misc_feature 1..22: note = Synthetic construct
  source 1..22: mol_type = other DNA
gtgggagaaaactccacacaag

SEQ ID NO: 17486 - DNA, 22 bp, synthetic construct
  misc_feature 1..22: note = Synthetic construct
  source 1..22: mol_type = other DNA
gtgggagaaaactccacacgag

SEQ ID NO: 17487 - DNA, 22 bp, synthetic construct
  misc_feature 1..22: note = Synthetic construct
  source 1..22: mol_type = other DNA
gtgggagaaaactccacactag

SEQ ID NO: 17488 - DNA, 22 bp, synthetic construct
  misc_feature 1..22: note = Synthetic construct
  source 1..22: mol_type = other DNA
gtgggagaaaactccacacccg

SEQ ID NO: 17489 - DNA, 22 bp, synthetic construct
  misc_feature 1..22: note = Synthetic construct
  source 1..22: mol_type = other DNA
gtgggagaaaactccacaccgg

SEQ ID NO: 17490 - DNA, 22 bp, synthetic construct
  misc_feature 1..22: note = Synthetic construct
  source 1..22: mol_type = other DNA
gtgggagaaaactccacacctg

SEQ ID NO: 17491 - DNA, 22 bp, synthetic construct
  misc_feature 1..22: note = Synthetic construct
  source 1..22: mol_type = other DNA
gtgggagaaaactccacaccaa

SEQ ID NO: 17492 - DNA, 22 bp, synthetic construct
  misc_feature 1..22: note = Synthetic construct
  source 1..22: mol_type = other DNA
gtgggagaaaactccacaccac

SEQ ID NO: 17493 - DNA, 22 bp, synthetic construct
  misc_feature 1..22: note = Synthetic construct
  source 1..22: mol_type = other DNA
gtgggagaaaactccacaccat

SEQ ID NO: 17494 - DNA, 21 bp, synthetic construct
  misc_feature 1..21: note = Synthetic construct
  source 1..21: mol_type = other DNA
acttccagtagcgacagaagc

SEQ ID NO: 17495 - DNA, 21 bp, synthetic construct
  misc_feature 1..21: note = Synthetic construct
  source 1..21: mol_type = other DNA
ccttccagtagcgacagaagc

SEQ ID NO: 17496 - DNA, 21 bp, synthetic construct
  misc_feature 1..21: note = Synthetic construct
  source 1..21: mol_type = other DNA
tcttccagtagcgacagaagc

SEQ ID NO: 17497 - DNA, 21 bp, synthetic construct
  misc_feature 1..21: note = Synthetic construct
  source 1..21: mol_type = other DNA
gattccagtagcgacagaagc

SEQ ID NO: 17498 - DNA, 21 bp, synthetic construct
  misc_feature 1..21: note = Synthetic construct
  source 1..21: mol_type = other DNA
ggttccagtagcgacagaagc

SEQ ID NO: 17499 - DNA, 21 bp, synthetic construct
  misc_feature 1..21: note = Synthetic construct
  source 1..21: mol_type = other DNA
gtttccagtagcgacagaagc

SEQ ID NO: 17500 - DNA, 21 bp, synthetic construct
  misc_feature 1..21: note = Synthetic construct
  source 1..21: mol_type = other DNA
gcatccagtagcgacagaagc

SEQ ID NO: 17501 - DNA, 21 bp, synthetic construct
  misc_feature 1..21: note = Synthetic construct
  source 1..21: mol_type = other DNA
gcctccagtagcgacagaagc

SEQ ID NO: 17502 - DNA, 21 bp, synthetic construct
  misc_feature 1..21: note = Synthetic construct
  source 1..21: mol_type = other DNA
gcgtccagtagcgacagaagc

SEQ ID NO: 17503 - DNA, 21 bp, synthetic construct
  misc_feature 1..21: note = Synthetic construct
  source 1..21: mol_type = other DNA
gctaccagtagcgacagaagc

SEQ ID NO: 17504 - DNA, 21 bp, synthetic construct
  misc_feature 1..21: note = Synthetic construct
  source 1..21: mol_type = other DNA
gctcccagtagcgacagaagc

SEQ ID NO: 17505 - DNA, 21 bp, synthetic construct
  misc_feature 1..21: note = Synthetic construct
  source 1..21: mol_type = other DNA
gctgccagtagcgacagaagc

SEQ ID NO: 17506 - DNA, 21 bp, synthetic construct
  misc_feature 1..21: note = Synthetic construct
  source 1..21: mol_type = other DNA
gcttacagtagcgacagaagc

SEQ ID NO: 17507 - DNA, 21 bp, synthetic construct
  misc_feature 1..21: note = Synthetic construct
  source 1..21: mol_type = other DNA
gcttgcagtagcgacagaagc

SEQ ID NO: 17508 - DNA, 21 bp, synthetic construct
  misc_feature 1..21: note = Synthetic construct
  source 1..21: mol_type = other DNA
gctttcagtagcgacagaagc

SEQ ID NO: 17509 - DNA, 21 bp, synthetic construct
  misc_feature 1..21: note = Synthetic construct
  source 1..21: mol_type = other DNA
gcttcaagtagcgacagaagc

SEQ ID NO: 17510 - DNA, 21 bp, synthetic construct
  misc_feature 1..21: note = Synthetic construct
  source 1..21: mol_type = other DNA
gcttcgagtagcgacagaagc

SEQ ID NO: 17511 - DNA, 21 bp, synthetic construct
  misc_feature 1..21: note = Synthetic construct
  source 1..21: mol_type = other DNA
gcttctagtagcgacagaagc

SEQ ID NO: 17512 - DNA, 21 bp, synthetic construct
  misc_feature 1..21: note = Synthetic construct
  source 1..21: mol_type = other DNA
gcttcccgtagcgacagaagc

SEQ ID NO: 17513 - DNA, 21 bp, synthetic construct
  misc_feature 1..21: note = Synthetic construct
  source 1..21: mol_type = other DNA
gcttccggtagcgacagaagc

SEQ ID NO: 17514 - DNA, 21 bp, synthetic construct
  misc_feature 1..21: note = Synthetic construct
  source 1..21: mol_type = other DNA
gcttcctgtagcgacagaagc

SEQ ID NO: 17515 - DNA, 21 bp, synthetic construct
  misc_feature 1..21: note = Synthetic construct
  source 1..21: mol_type = other DNA
gcttccaatagcgacagaagc

SEQ ID NO: 17516 - DNA, 21 bp, synthetic construct
  misc_feature 1..21: note = Synthetic construct
  source 1..21: mol_type = other DNA
gcttccactagcgacagaagc

SEQ ID NO: 17517 - DNA, 21 bp, synthetic construct
  misc_feature 1..21: note = Synthetic construct
  source 1..21: mol_type = other DNA
gcttccattagcgacagaagc

SEQ ID NO: 17518 - DNA, 21 bp, synthetic construct
  misc_feature 1..21: note = Synthetic construct
  source 1..21: mol_type = other DNA
gcttccagaagcgacagaagc

SEQ ID NO: 17519 - DNA, 21 bp, synthetic construct
  misc_feature 1..21: note = Synthetic construct
  source 1..21: mol_type = other DNA
gcttccagcagcgacagaagc

SEQ ID NO: 17520 - DNA, 21 bp, synthetic construct
  misc_feature 1..21: note = Synthetic construct
  source 1..21: mol_type = other DNA
gcttccaggagcgacagaagc

SEQ ID NO: 17521 - DNA, 21 bp, synthetic construct
  misc_feature 1..21: note = Synthetic construct
  source 1..21: mol_type = other DNA
gcttccagtcgcgacagaagc

SEQ ID NO: 17522 - DNA, 21 bp, synthetic construct
  misc_feature 1..21: note = Synthetic construct
  source 1..21: mol_type = other DNA
gcttccagtggcgacagaagc

SEQ ID NO: 17523 - DNA, 21 bp, synthetic construct
  misc_feature 1..21: note = Synthetic construct
  source 1..21: mol_type = other DNA
gcttccagttgcgacagaagc

SEQ ID NO: 17524 - DNA, 21 bp, synthetic construct
  misc_feature 1..21: note = Synthetic construct
  source 1..21: mol_type = other DNA
gcttccagtaacgacagaagc

SEQ ID NO: 17525 - DNA, 21 bp, synthetic construct
  misc_feature 1..21: note = Synthetic construct
  source 1..21: mol_type = other DNA
gcttccagtaccgacagaagc

SEQ ID NO: 17526 - DNA, 21 bp, synthetic construct
  misc_feature 1..21: note = Synthetic construct
  source 1..21: mol_type = other DNA
gcttccagtatcgacagaagc

SEQ ID NO: 17527 - DNA, 21 bp, synthetic construct
  misc_feature 1..21: note = Synthetic construct
  source 1..21: mol_type = other DNA
gcttccagtagagacagaagc

SEQ ID NO: 17528 - DNA, 21 bp, synthetic construct
  misc_feature 1..21: note = Synthetic construct
  source 1..21: mol_type = other DNA
gcttccagtagggacagaagc

SEQ ID NO: 17529 - DNA, 21 bp, synthetic construct
  misc_feature 1..21: note = Synthetic construct
  source 1..21: mol_type = other DNA
gcttccagtagtgacagaagc

SEQ ID NO: 17530 - DNA, 21 bp, synthetic construct
  misc_feature 1..21: note = Synthetic construct
  source 1..21: mol_type = other DNA
gcttccagtagcaacagaagc

SEQ ID NO: 17531 - DNA, 21 bp, synthetic construct
  misc_feature 1..21: note = Synthetic construct
  source 1..21: mol_type = other DNA
gcttccagtagccacagaagc

SEQ ID NO: 17532 - DNA, 21 bp, synthetic construct
  misc_feature 1..21: note = Synthetic construct
  source 1..21: mol_type = other DNA
gcttccagtagctacagaagc

SEQ ID NO: 17533 - DNA, 21 bp, synthetic construct
  misc_feature 1..21: note = Synthetic construct
  source 1..21: mol_type = other DNA
gcttccagtagcgccagaagc

SEQ ID NO: 17534 - DNA, 21 bp, synthetic construct
  misc_feature 1..21: note = Synthetic construct
  source 1..21: mol_type = other DNA
gcttccagtagcggcagaagc

SEQ ID NO: 17535 - DNA, 21 bp, synthetic construct
  misc_feature 1..21: note = Synthetic construct
  source 1..21: mol_type = other DNA
gcttccagtagcgtcagaagc

SEQ ID NO: 17536 - DNA, 21 bp, synthetic construct
  misc_feature 1..21: note = Synthetic construct
  source 1..21: mol_type = other DNA
gcttccagtagcgaaagaagc

SEQ ID NO: 17537 - DNA, 21 bp, synthetic construct
  misc_feature 1..21: note = Synthetic construct
  source 1..21: mol_type = other DNA
gcttccagtagcgagagaagc

SEQ ID NO: 17538 - DNA, 21 bp, synthetic construct
  misc_feature 1..21: note = Synthetic construct
  source 1..21: mol_type = other DNA
gcttccagtagcgatagaagc

SEQ ID NO: 17539 - DNA, 21 bp, synthetic construct
  misc_feature 1..21: note = Synthetic construct
  source 1..21: mol_type = other DNA
gcttccagtagcgaccgaagc

SEQ ID NO: 17540 - DNA, 21 bp, synthetic construct
  misc_feature 1..21: note = Synthetic construct
  source 1..21: mol_type = other DNA
gcttccagtagcgacggaagc

SEQ ID NO: 17541 - DNA, 21 bp, synthetic construct
  misc_feature 1..21: note = Synthetic construct
  source 1..21: mol_type = other DNA
gcttccagtagcgactgaagc

SEQ ID NO: 17542 - DNA, 21 bp, synthetic construct
  misc_feature 1..21: note = Synthetic construct
  source 1..21: mol_type = other DNA
gcttccagtagcgacaaaagc

SEQ ID NO: 17543 - DNA, 21 bp, synthetic construct
  misc_feature 1..21: note = Synthetic construct
  source 1..21: mol_type = other DNA
gcttccagtagcgacacaagc

SEQ ID NO: 17544 - DNA, 21 bp, synthetic construct
  misc_feature 1..21: note = Synthetic construct
  source 1..21: mol_type = other DNA
gcttccagtagcgacataagc

SEQ ID NO: 17545 - DNA, 21 bp, synthetic construct
  misc_feature 1..21: note = Synthetic construct
  source 1..21: mol_type = other DNA
gcttccagtagcgacagcagc

SEQ ID NO: 17546 - DNA, 21 bp, synthetic construct
  misc_feature 1..21: note = Synthetic construct
  source 1..21: mol_type = other DNA
gcttccagtagcgacaggagc

SEQ ID NO: 17547 - DNA, 21 bp, synthetic construct
  misc_feature 1..21: note = Synthetic construct
  source 1..21: mol_type = other DNA
gcttccagtagcgacagtagc

SEQ ID NO: 17548 - DNA, 21 bp, synthetic construct
  misc_feature 1..21: note = Synthetic construct
  source 1..21: mol_type = other DNA
gcttccagtagcgacagacgc

SEQ ID NO: 17549 - DNA, 21 bp, synthetic construct
  misc_feature 1..21: note = Synthetic construct
  source 1..21: mol_type = other DNA
gcttccagtagcgacagaggc

SEQ ID NO: 17550 - DNA, 21 bp, synthetic construct
  misc_feature 1..21: note = Synthetic construct
  source 1..21: mol_type = other DNA
gcttccagtagcgacagatgc

SEQ ID NO: 17551 - DNA, 21 bp, synthetic construct
  misc_feature 1..21: note = Synthetic construct
  source 1..21: mol_type = other DNA
gcttccagtagcgacagaaac

SEQ ID NO: 17552 - DNA, 21 bp, synthetic construct
  misc_feature 1..21: note = Synthetic construct
  source 1..21: mol_type = other DNA
gcttccagtagcgacagaacc

SEQ ID NO: 17553 - DNA, 21 bp, synthetic construct
  misc_feature 1..21: note = Synthetic construct
  source 1..21: mol_type = other DNA
gcttccagtagcgacagaatc

SEQ ID NO: 17554 - DNA, 21 bp, synthetic construct
  misc_feature 1..21: note = Synthetic construct
  source 1..21: mol_type = other DNA
gcttccagtagcgacagaaga

SEQ ID NO: 17555 - DNA, 21 bp, synthetic construct
  misc_feature 1..21: note = Synthetic construct
  source 1..21: mol_type = other DNA
gcttccagtagcgacagaagg

SEQ ID NO: 17556 - DNA, 21 bp, synthetic construct
  misc_feature 1..21: note = Synthetic construct
  source 1..21: mol_type = other DNA
gcttccagtagcgacagaagt

SEQ ID NO: 17557 - DNA, 22 bp, synthetic construct
  misc_feature 1..22: note = Synthetic construct
  source 1..22: mol_type = other DNA
cacagtctgggttgccacttta

SEQ ID NO: 17558 - DNA, 22 bp, synthetic construct
  misc_feature 1..22: note = Synthetic construct
  source 1..22: mol_type = other DNA
gacagtctgggttgccacttta

SEQ ID NO: 17559 - DNA, 22 bp, synthetic construct
  misc_feature 1..22: note = Synthetic construct
  source 1..22: mol_type = other DNA
tacagtctgggttgccacttta

SEQ ID NO: 17560 - DNA, 22 bp, synthetic construct
  misc_feature 1..22: note = Synthetic construct
  source 1..22: mol_type = other DNA
accagtctgggttgccacttta

SEQ ID NO: 17561 - DNA, 22 bp, synthetic construct
  misc_feature 1..22: note = Synthetic construct
  source 1..22: mol_type = other DNA
agcagtctgggttgccacttta

SEQ ID NO: 17562 - DNA, 22 bp, synthetic construct
  misc_feature 1..22: note = Synthetic construct
  source 1..22: mol_type = other DNA
atcagtctgggttgccacttta

SEQ ID NO: 17563 - DNA, 22 bp, synthetic construct
  misc_feature 1..22: note = Synthetic construct
  source 1..22: mol_type = other DNA
aaaagtctgggttgccacttta

SEQ ID NO: 17564 - DNA, 22 bp, synthetic construct
  misc_feature 1..22: note = Synthetic construct
  source 1..22: mol_type = other DNA
aagagtctgggttgccacttta

SEQ ID NO: 17565 - DNA, 22 bp, synthetic construct
  misc_feature 1..22: note = Synthetic construct
  source 1..22: mol_type = other DNA
aatagtctgggttgccacttta

SEQ ID NO: 17566 - DNA, 22 bp, synthetic construct
  misc_feature 1..22: note = Synthetic construct
  source 1..22: mol_type = other DNA
aaccgtctgggttgccacttta

SEQ ID NO: 17567 - DNA, 22 bp, synthetic construct
  misc_feature 1..22: note = Synthetic construct
  source 1..22: mol_type = other DNA
aacggtctgggttgccacttta

SEQ ID NO: 17568 - DNA, 22 bp, synthetic construct
  misc_feature 1..22: note = Synthetic construct
  source 1..22: mol_type = other DNA
aactgtctgggttgccacttta

SEQ ID NO: 17569 - DNA, 22 bp, synthetic construct
  misc_feature 1..22: note = Synthetic construct
  source 1..22: mol_type = other DNA
aacaatctgggttgccacttta

SEQ ID NO: 17570 - DNA, 22 bp, synthetic construct
  misc_feature 1..22: note = Synthetic construct
  source 1..22: mol_type = other DNA
aacactctgggttgccacttta

SEQ ID NO: 17571 - DNA, 22 bp, synthetic construct
  misc_feature 1..22: note = Synthetic construct
  source 1..22: mol_type = other DNA
aacattctgggttgccacttta

SEQ ID NO: 17572 - DNA, 22 bp, synthetic construct
  misc_feature 1..22: note = Synthetic construct
  source 1..22: mol_type = other DNA
aacagactgggttgccacttta

SEQ ID NO: 17573 - DNA, 22 bp, synthetic construct
  misc_feature 1..22: note = Synthetic construct
  source 1..22: mol_type = other DNA
aacagcctgggttgccacttta

SEQ ID NO: 17574 - DNA, 22 bp, synthetic construct
  misc_feature 1..22: note = Synthetic construct
  source 1..22: mol_type = other DNA
aacaggctgggttgccacttta

SEQ ID NO: 17575 - DNA, 22 bp, synthetic construct
  misc_feature 1..22: note = Synthetic construct
  source 1..22: mol_type = other DNA
aacagtatgggttgccacttta

SEQ ID NO: 17576 - DNA, 22 bp, synthetic construct
  misc_feature 1..22: note = Synthetic construct
  source 1..22: mol_type = other DNA
aacagtgtgggttgccacttta

SEQ ID NO: 17577 - DNA, 22 bp, synthetic construct
  misc_feature 1..22: note = Synthetic construct
  source 1..22: mol_type = other DNA
aacagtttgggttgccacttta

SEQ ID NO: 17578 - DNA, 22 bp, synthetic construct
  misc_feature 1..22: note = Synthetic construct
  source 1..22: mol_type = other DNA
aacagtcagggttgccacttta

SEQ ID NO: 17579 - DNA, 22 bp, synthetic construct
  misc_feature 1..22: note = Synthetic construct
  source 1..22: mol_type = other DNA
aacagtccgggttgccacttta

SEQ ID NO: 17580 - DNA, 22 bp, synthetic construct
  misc_feature 1..22: note = Synthetic construct
  source 1..22: mol_type = other DNA
aacagtcggggttgccacttta

SEQ ID NO: 17581 - DNA, 22 bp, synthetic construct
  misc_feature 1..22: note = Synthetic construct
  source 1..22: mol_type = other DNA
aacagtctaggttgccacttta

SEQ ID NO: 17582 - DNA, 22 bp, synthetic construct
  misc_feature 1..22: note = Synthetic construct
  source 1..22: mol_type = other DNA
aacagtctcggttgccacttta

SEQ ID NO: 17583 - DNA, 22 bp, synthetic construct
  misc_feature 1..22: note = Synthetic construct
  source 1..22: mol_type = other DNA
aacagtcttggttgccacttta

SEQ ID NO: 17584 - DNA, 22 bp, synthetic construct
  misc_feature 1..22: note = Synthetic construct
  source 1..22: mol_type = other DNA
aacagtctgagttgccacttta

SEQ ID NO: 17585 - DNA, 22 bp, synthetic construct
  misc_feature 1..22: note = Synthetic construct
  source 1..22: mol_type = other DNA
aacagtctgcgttgccacttta

SEQ ID NO: 17586 - DNA, 22 bp, synthetic construct
  misc_feature 1..22: note = Synthetic construct
  source 1..22: mol_type = other DNA
aacagtctgtgttgccacttta

SEQ ID NO: 17587 - DNA, 22 bp, synthetic construct
  misc_feature 1..22: note = Synthetic construct
  source 1..22: mol_type = other DNA
aacagtctggattgccacttta

SEQ ID NO: 17588 - DNA, 22 bp, synthetic construct
  misc_feature 1..22: note = Synthetic construct
  source 1..22: mol_type = other DNA
aacagtctggcttgccacttta

SEQ ID NO: 17589 - DNA, 22 bp, synthetic construct
  misc_feature 1..22: note = Synthetic construct
  source 1..22: mol_type = other DNA
aacagtctggtttgccacttta

SEQ ID NO: 17590 - DNA, 22 bp, synthetic construct
  misc_feature 1..22: note = Synthetic construct
  source 1..22: mol_type = other DNA
aacagtctgggatgccacttta

SEQ ID NO: 17591 - DNA, 22 bp, synthetic construct
  misc_feature 1..22: note = Synthetic construct
  source 1..22: mol_type = other DNA
aacagtctgggctgccacttta

SEQ ID NO: 17592 - DNA, 22 bp, synthetic construct
  misc_feature 1..22: note = Synthetic construct
  source 1..22: mol_type = other DNA
aacagtctggggtgccacttta

SEQ ID NO: 17593 - DNA, 22 bp, synthetic construct
  misc_feature 1..22: note = Synthetic construct
  source 1..22: mol_type = other DNA
aacagtctgggtagccacttta

SEQ ID NO: 17594 - DNA, 22 bp, synthetic construct
  misc_feature 1..22: note = Synthetic construct
  source 1..22: mol_type = other DNA
aacagtctgggtcgccacttta

SEQ ID NO: 17595 - DNA, 22 bp, synthetic construct
  misc_feature 1..22: note = Synthetic construct
  source 1..22: mol_type = other DNA
aacagtctgggtggccacttta

SEQ ID NO: 17596 - DNA, 22 bp, synthetic construct
  misc_feature 1..22: note = Synthetic construct
  source 1..22: mol_type = other DNA
aacagtctgggttaccacttta

SEQ ID NO: 17597 - DNA, 22 bp, synthetic construct
  misc_feature 1..22: note = Synthetic construct
  source 1..22: mol_type = other DNA
aacagtctgggttcccacttta

SEQ ID NO: 17598 - DNA, 22 bp, synthetic construct
  misc_feature 1..22: note = Synthetic construct
  source 1..22: mol_type = other DNA
aacagtctgggtttccacttta

SEQ ID NO: 17599 - DNA, 22 bp, synthetic construct
  misc_feature 1..22: note = Synthetic construct
  source 1..22: mol_type = other DNA
aacagtctgggttgacacttta

SEQ ID NO: 17600 - DNA, 22 bp, synthetic construct
  misc_feature 1..22: note = Synthetic construct
  source 1..22: mol_type = other DNA
aacagtctgggttggcacttta

SEQ ID NO: 17601 - DNA, 22 bp, synthetic construct
  misc_feature 1..22: note = Synthetic construct
  source 1..22: mol_type = other DNA
aacagtctgggttgtcacttta

SEQ ID NO: 17602 - DNA, 22 bp, synthetic construct
  misc_feature 1..22: note = Synthetic construct
  source 1..22: mol_type = other DNA
aacagtctgggttgcaacttta

SEQ ID NO: 17603 - DNA, 22 bp, synthetic construct
  misc_feature 1..22: note = Synthetic construct
  source 1..22: mol_type = other DNA
aacagtctgggttgcgacttta

SEQ ID NO: 17604 - DNA, 22 bp, synthetic construct
  misc_feature 1..22: note = Synthetic construct
  source 1..22: mol_type = other DNA
aacagtctgggttgctacttta

SEQ ID NO: 17605 - DNA, 22 bp, synthetic construct
  misc_feature 1..22: note = Synthetic construct
  source 1..22: mol_type = other DNA
aacagtctgggttgccccttta

SEQ ID NO: 17606 - DNA, 22 bp, synthetic construct
  misc_feature 1..22: note = Synthetic construct
  source 1..22: mol_type = other DNA
aacagtctgggttgccgcttta

SEQ ID NO: 17607 - DNA, 22 bp, synthetic construct
  misc_feature 1..22: note = Synthetic construct
  source 1..22: mol_type = other DNA
aacagtctgggttgcctcttta

SEQ ID NO: 17608 - DNA, 22 bp, synthetic construct
  misc_feature 1..22: note = Synthetic construct
  source 1..22: mol_type = other DNA
aacagtctgggttgccaattta

SEQ ID NO: 17609 - DNA, 22 bp, synthetic construct
  misc_feature 1..22: note = Synthetic construct
  source 1..22: mol_type = other DNA
aacagtctgggttgccagttta

SEQ ID NO: 17610 - DNA, 22 bp, synthetic construct
  misc_feature 1..22: note = Synthetic construct
  source 1..22: mol_type = other DNA
aacagtctgggttgccatttta

SEQ ID NO: 17611 - DNA, 22 bp, synthetic construct
  misc_feature 1..22: note = Synthetic construct
  source 1..22: mol_type = other DNA
aacagtctgggttgccacatta

SEQ ID NO: 17612 - DNA, 22 bp, synthetic construct
  misc_feature 1..22: note = Synthetic construct
  source 1..22: mol_type = other DNA
aacagtctgggttgccacctta

SEQ ID NO: 17613 - DNA, 22 bp, synthetic construct
  misc_feature 1..22: note = Synthetic construct
  source 1..22: mol_type = other DNA
aacagtctgggttgccacgtta

SEQ ID NO: 17614 - DNA, 22 bp, synthetic construct
  misc_feature 1..22: note = Synthetic construct
  source 1..22: mol_type = other DNA
aacagtctgggttgccactata

SEQ ID NO: 17615 - DNA, 22 bp, synthetic construct
  misc_feature 1..22: note = Synthetic construct
  source 1..22: mol_type = other DNA
aacagtctgggttgccactcta

SEQ ID NO: 17616 - DNA, 22 bp, synthetic construct
  misc_feature 1..22: note = Synthetic construct
  source 1..22: mol_type = other DNA
aacagtctgggttgccactgta

SEQ ID NO: 17617 - DNA, 22 bp, synthetic construct
  misc_feature 1..22: note = Synthetic construct
  source 1..22: mol_type = other DNA
aacagtctgggttgccacttaa

SEQ ID NO: 17618 - DNA, 22 bp, synthetic construct
  misc_feature 1..22: note = Synthetic construct
  source 1..22: mol_type = other DNA
aacagtctgggttgccacttca

SEQ ID NO: 17619 - DNA, 22 bp, synthetic construct
  misc_feature 1..22: note = Synthetic construct
  source 1..22: mol_type = other DNA
aacagtctgggttgccacttga

SEQ ID NO: 17620 - DNA, 22 bp, synthetic construct
  misc_feature 1..22: note = Synthetic construct
  source 1..22: mol_type = other DNA
aacagtctgggttgccactttc

SEQ ID NO: 17621 - DNA, 22 bp, synthetic construct
  misc_feature 1..22: note = Synthetic construct
  source 1..22: mol_type = other DNA
aacagtctgggttgccactttg

SEQ ID NO: 17622 - DNA, 22 bp, synthetic construct
  misc_feature 1..22: note = Synthetic construct
  source 1..22: mol_type = other DNA
aacagtctgggttgccactttt

SEQ ID NO: 17623 - DNA, 20 bp, synthetic construct
  misc_feature 1..20: note = Synthetic construct
  source 1..20: mol_type = other DNA
cgagaaagatcgcgaggaag

SEQ ID NO: 17624 - DNA, 20 bp, synthetic construct
  misc_feature 1..20: note = Synthetic construct
  source 1..20: mol_type = other DNA
ggagaaagatcgcgaggaag

SEQ ID NO: 17625 - DNA, 20 bp, synthetic construct
  misc_feature 1..20: note = Synthetic construct
  source 1..20: mol_type = other DNA
tgagaaagatcgcgaggaag

SEQ ID NO: 17626 - DNA, 20 bp, synthetic construct
  misc_feature 1..20: note = Synthetic construct
  source 1..20: mol_type = other DNA
aaagaaagatcgcgaggaag

SEQ ID NO: 17627 - DNA, 20 bp, synthetic construct
  misc_feature 1..20: note = Synthetic construct
  source 1..20: mol_type = other DNA
acagaaagatcgcgaggaag

SEQ ID NO: 17628 - DNA, 20 bp, synthetic construct
  misc_feature 1..20: note = Synthetic construct
  source 1..20: mol_type = other DNA
atagaaagatcgcgaggaag

SEQ ID NO: 17629 - DNA, 20 bp, synthetic construct
  misc_feature 1..20: note = Synthetic construct
  source 1..20: mol_type = other DNA
agcgaaagatcgcgaggaag

SEQ ID NO: 17630 - DNA, 20 bp, synthetic construct
  misc_feature 1..20: note = Synthetic construct
  source 1..20: mol_type = other DNA
agggaaagatcgcgaggaag

SEQ ID NO: 17631 - DNA, 20 bp, synthetic construct
  misc_feature 1..20: note = Synthetic construct
  source 1..20: mol_type = other DNA
agtgaaagatcgcgaggaag

SEQ ID NO: 17632 - DNA, 20 bp, synthetic construct
  misc_feature 1..20: note = Synthetic construct
  source 1..20: mol_type = other DNA
agaaaaagatcgcgaggaag

SEQ ID NO: 17633 - DNA, 20 bp, synthetic construct
  misc_feature 1..20: note = Synthetic construct
  source 1..20: mol_type = other DNA
agacaaagatcgcgaggaag

SEQ ID NO: 17634 - DNA, 20 bp, synthetic construct
  misc_feature 1..20: note = Synthetic construct
  source 1..20: mol_type = other DNA
agataaagatcgcgaggaag

SEQ ID NO: 17635 - DNA, 20 bp, synthetic construct
  misc_feature 1..20: note = Synthetic construct
  source 1..20: mol_type = other DNA
agagcaagatcgcgaggaag

SEQ ID NO: 17636 - DNA, 20 bp, synthetic construct
  misc_feature 1..20: note = Synthetic construct
  source 1..20: mol_type = other DNA
agaggaagatcgcgaggaag

SEQ ID NO: 17637 - DNA, 20 bp, synthetic construct
  misc_feature 1..20: note = Synthetic construct
  source 1..20: mol_type = other DNA
agagtaagatcgcgaggaag

SEQ ID NO: 17638 - DNA, 20 bp, synthetic construct
  misc_feature 1..20: note = Synthetic construct
  source 1..20: mol_type = other DNA
agagacagatcgcgaggaag

SEQ ID NO: 17639 - DNA, 20 bp, synthetic construct
  misc_feature 1..20: note = Synthetic construct
  source 1..20: mol_type = other DNA
agagagagatcgcgaggaag

SEQ ID NO: 17640 - DNA, 20 bp, synthetic construct
  misc_feature 1..20: note = Synthetic construct
  source 1..20: mol_type = other DNA
agagatagatcgcgaggaag

SEQ ID NO: 17641 - DNA, 20 bp, synthetic construct
  misc_feature 1..20: note = Synthetic construct
  source 1..20: mol_type = other DNA
agagaacgatcgcgaggaag

SEQ ID NO: 17642 - DNA, 20 bp, synthetic construct
  misc_feature 1..20: note = Synthetic construct
  source 1..20: mol_type = other DNA
agagaaggatcgcgaggaag

SEQ ID NO: 17643 - DNA, 20 bp, synthetic construct
  misc_feature 1..20: note = Synthetic construct
  source 1..20: mol_type = other DNA
agagaatgatcgcgaggaag

SEQ ID NO: 17644 - DNA, 20 bp, synthetic construct
  misc_feature 1..20: note = Synthetic construct
  source 1..20: mol_type = other DNA
agagaaaaatcgcgaggaag

SEQ ID NO: 17645 - DNA, 20 bp, synthetic construct
  misc_feature 1..20: note = Synthetic construct
  source 1..20: mol_type = other DNA
agagaaacatcgcgaggaag

SEQ ID NO: 17646 - DNA, 20 bp, synthetic construct
  misc_feature 1..20: note = Synthetic construct
  source 1..20: mol_type = other DNA
agagaaatatcgcgaggaag

SEQ ID NO: 17647 - DNA, 20 bp, synthetic construct
  misc_feature 1..20: note = Synthetic construct
  source 1..20: mol_type = other DNA
agagaaagctcgcgaggaag

SEQ ID NO: 17648 - DNA, 20 bp, synthetic construct
  misc_feature 1..20: note = Synthetic construct
  source 1..20: mol_type = other DNA
agagaaaggtcgcgaggaag

SEQ ID NO: 17649 - DNA, 20 bp, synthetic construct
  misc_feature 1..20: note = Synthetic construct
  source 1..20: mol_type = other DNA
agagaaagttcgcgaggaag

SEQ ID NO: 17650 - DNA, 20 bp, synthetic construct
  misc_feature 1..20: note = Synthetic construct
  source 1..20: mol_type = other DNA
agagaaagaacgcgaggaag

SEQ ID NO: 17651 - DNA, 20 bp, synthetic construct
  misc_feature 1..20: note = Synthetic construct
  source 1..20: mol_type = other DNA
agagaaagaccgcgaggaag

SEQ ID NO: 17652 - DNA, 20 bp, synthetic construct
  misc_feature 1..20: note = Synthetic construct
  source 1..20: mol_type = other DNA
agagaaagagcgcgaggaag

SEQ ID NO: 17653 - DNA, 20 bp, synthetic construct
  misc_feature 1..20: note = Synthetic construct
  source 1..20: mol_type = other DNA
agagaaagatagcgaggaag

SEQ ID NO: 17654 - DNA, 20 bp, synthetic construct
  misc_feature 1..20: note = Synthetic construct
  source 1..20: mol_type = other DNA
agagaaagatggcgaggaag

SEQ ID NO: 17655 - DNA, 20 bp, synthetic construct
  misc_feature 1..20: note = Synthetic construct
  source 1..20: mol_type = other DNA
agagaaagattgcgaggaag

SEQ ID NO: 17656 - DNA, 20 bp, synthetic construct
  misc_feature 1..20: note = Synthetic construct
  source 1..20: mol_type = other DNA
agagaaagatcacgaggaag

SEQ ID NO: 17657 - DNA, 20 bp, synthetic construct
  misc_feature 1..20: note = Synthetic construct
  source 1..20: mol_type = other DNA
agagaaagatcccgaggaag

SEQ ID NO: 17658 - DNA, 20 bp, synthetic construct
  misc_feature 1..20: note = Synthetic construct
  source 1..20: mol_type = other DNA
agagaaagatctcgaggaag

SEQ ID NO: 17659 - DNA, 20 bp, synthetic construct
  misc_feature 1..20: note = Synthetic construct
  source 1..20: mol_type = other DNA
agagaaagatcgagaggaag

SEQ ID NO: 17660 - DNA, 20 bp, synthetic construct
  misc_feature 1..20: note = Synthetic construct
  source 1..20: mol_type = other DNA
agagaaagatcgggaggaag

SEQ ID NO: 17661 - DNA, 20 bp, synthetic construct
  misc_feature 1..20: note = Synthetic construct
  source 1..20: mol_type = other DNA
agagaaagatcgtgaggaag

SEQ ID NO: 17662 - DNA, 20 bp, synthetic construct
  misc_feature 1..20: note = Synthetic construct
  source 1..20: mol_type = other DNA
agagaaagatcgcaaggaag

SEQ ID NO: 17663 - DNA, 20 bp, synthetic construct
  misc_feature 1..20: note = Synthetic construct
  source 1..20: mol_type = other DNA
agagaaagatcgccaggaag

SEQ ID NO: 17664 - DNA, 20 bp, synthetic construct
  misc_feature 1..20: note = Synthetic construct
  source 1..20: mol_type = other DNA
agagaaagatcgctaggaag

SEQ ID NO: 17665 - DNA, 20 bp, synthetic construct
  misc_feature 1..20: note = Synthetic construct
  source 1..20: mol_type = other DNA
agagaaagatcgcgcggaag

SEQ ID NO: 17666 - DNA, 20 bp, synthetic construct
  misc_feature 1..20: note = Synthetic construct
  source 1..20: mol_type = other DNA
agagaaagatcgcggggaag

SEQ ID NO: 17667 - DNA, 20 bp, synthetic construct
  misc_feature 1..20: note = Synthetic construct
  source 1..20: mol_type = other DNA
agagaaagatcgcgtggaag

SEQ ID NO: 17668 - DNA, 20 bp, synthetic construct
  misc_feature 1..20: note = Synthetic construct
  source 1..20: mol_type = other DNA
agagaaagatcgcgaagaag

SEQ ID NO: 17669 - DNA, 20 bp, synthetic construct
  misc_feature 1..20: note = Synthetic construct
  source 1..20: mol_type = other DNA
agagaaagatcgcgacgaag

SEQ ID NO: 17670 - DNA, 20 bp, synthetic construct
  misc_feature 1..20: note = Synthetic construct
  source 1..20: mol_type = other DNA
agagaaagatcgcgatgaag

SEQ ID NO: 17671 - DNA, 20 bp, synthetic construct
  misc_feature 1..20: note = Synthetic construct
  source 1..20: mol_type = other DNA
agagaaagatcgcgagaaag

SEQ ID NO: 17672 - DNA, 20 bp, synthetic construct
  misc_feature 1..20: note = Synthetic construct
  source 1..20: mol_type = other DNA
agagaaagatcgcgagcaag

SEQ ID NO: 17673 - DNA, 20 bp, synthetic construct
  misc_feature 1..20: note = Synthetic construct
  source 1..20: mol_type = other DNA
agagaaagatcgcgagtaag

SEQ ID NO: 17674 - DNA, 20 bp, synthetic construct
  misc_feature 1..20: note = Synthetic construct
  source 1..20: mol_type = other DNA
agagaaagatcgcgaggcag

SEQ ID NO: 17675 - DNA, 20 bp, synthetic construct
  misc_feature 1..20: note = Synthetic construct
  source 1..20: mol_type = other DNA
agagaaagatcgcgagggag

SEQ ID NO: 17676 - DNA, 20 bp, synthetic construct
  misc_feature 1..20: note = Synthetic construct
  source 1..20: mol_type = other DNA
agagaaagatcgcgaggtag

SEQ ID NO: 17677 - DNA, 20 bp, synthetic construct
  misc_feature 1..20: note = Synthetic construct
  source 1..20: mol_type = other DNA
agagaaagatcgcgaggacg

SEQ ID NO: 17678 - DNA, 20 bp, synthetic construct
  misc_feature 1..20: note = Synthetic construct
  source 1..20: mol_type = other DNA
agagaaagatcgcgaggagg

SEQ ID NO: 17679 - DNA, 20 bp, synthetic construct
  misc_feature 1..20: note = Synthetic construct
  source 1..20: mol_type = other DNA
agagaaagatcgcgaggatg

SEQ ID NO: 17680 - DNA, 20 bp, synthetic construct
  misc_feature 1..20: note = Synthetic construct
  source 1..20: mol_type = other DNA
agagaaagatcgcgaggaaa

SEQ ID NO: 17681 - DNA, 20 bp, synthetic construct
  misc_feature 1..20: note = Synthetic construct
  source 1..20: mol_type = other DNA
agagaaagatcgcgaggaac

SEQ ID NO: 17682 - DNA, 20 bp, synthetic construct
  misc_feature 1..20: note = Synthetic construct
  source 1..20: mol_type = other DNA
agagaaagatcgcgaggaat

SEQ ID NO: 17683 - DNA, 20 bp, synthetic construct
  misc_feature 1..20: note = Synthetic construct
  source 1..20: mol_type = other DNA
atagggagcgtcaacgctta

SEQ ID NO: 17684 - DNA, 20 bp, synthetic construct
  misc_feature 1..20: note = Synthetic construct
  source 1..20: mol_type = other DNA
ctagggagcgtcaacgctta

SEQ ID NO: 17685 - DNA, 20 bp, synthetic construct
  misc_feature 1..20: note = Synthetic construct
  source 1..20: mol_type = other DNA
ttagggagcgtcaacgctta

SEQ ID NO: 17686 - DNA, 20 bp, synthetic construct
  misc_feature 1..20: note = Synthetic construct
  source 1..20: mol_type = other DNA
gaagggagcgtcaacgctta

SEQ ID NO: 17687 - DNA, 20 bp, synthetic construct
  misc_feature 1..20: note = Synthetic construct
  source 1..20: mol_type = other DNA
gcagggagcgtcaacgctta

SEQ ID NO: 17688 - DNA, 20 bp, synthetic construct
  misc_feature 1..20: note = Synthetic construct
  source 1..20: mol_type = other DNA
ggagggagcgtcaacgctta

SEQ ID NO: 17689 - DNA, 20 bp, synthetic construct
  misc_feature 1..20: note = Synthetic construct
  source 1..20: mol_type = other DNA
gtcgggagcgtcaacgctta

SEQ ID NO: 17690 - DNA, 20 bp, synthetic construct
  misc_feature 1..20: note = Synthetic construct
  source 1..20: mol_type = other DNA
gtggggagcgtcaacgctta

SEQ ID NO: 17691 - DNA, 20 bp, synthetic construct
  misc_feature 1..20: note = Synthetic construct
  source 1..20: mol_type = other DNA
gttgggagcgtcaacgctta

SEQ ID NO: 17692 - DNA, 20 bp, synthetic construct
  misc_feature 1..20: note = Synthetic construct
  source 1..20: mol_type = other DNA
gtaaggagcgtcaacgctta

SEQ ID NO: 17693 - DNA, 20 bp, synthetic construct
  misc_feature 1..20: note = Synthetic construct
  source 1..20: mol_type = other DNA
gtacggagcgtcaacgctta

SEQ ID NO: 17694 - DNA, 20 bp, synthetic construct
  misc_feature 1..20: note = Synthetic construct
  source 1..20: mol_type = other DNA
gtatggagcgtcaacgctta

SEQ ID NO: 17695 - DNA, 20 bp, synthetic construct
  misc_feature 1..20: note = Synthetic construct
  source 1..20: mol_type = other DNA
gtagagagcgtcaacgctta

SEQ ID NO: 17696 - DNA, 20 bp, synthetic construct
  misc_feature 1..20: note = Synthetic construct
  source 1..20: mol_type = other DNA
gtagcgagcgtcaacgctta

SEQ ID NO: 17697 - DNA, 20 bp, synthetic construct
  misc_feature 1..20: note = Synthetic construct
  source 1..20: mol_type = other DNA
gtagtgagcgtcaacgctta

SEQ ID NO: 17698 - DNA, 20 bp, synthetic construct
  misc_feature 1..20: note = Synthetic construct
  source 1..20: mol_type = other DNA
gtaggaagcgtcaacgctta

SEQ ID NO: 17699 - DNA, 20 bp, synthetic construct
  misc_feature 1..20: note = Synthetic construct
  source 1..20: mol_type = other DNA
gtaggcagcgtcaacgctta

SEQ ID NO: 17700 - DNA, 20 bp, synthetic construct
  misc_feature 1..20: note = Synthetic construct
  source 1..20: mol_type = other DNA
gtaggtagcgtcaacgctta

SEQ ID NO: 17701 - DNA, 20 bp, synthetic construct
  misc_feature 1..20: note = Synthetic construct
  source 1..20: mol_type = other DNA
gtagggcgcgtcaacgctta

SEQ ID NO: 17702 - DNA, 20 bp, synthetic construct
  misc_feature 1..20: note = Synthetic construct
  source 1..20: mol_type = other DNA
gtagggggcgtcaacgctta

SEQ ID NO: 17703 - DNA, 20 bp, synthetic construct
  misc_feature 1..20: note = Synthetic construct
  source 1..20: mol_type = other DNA
gtagggtgcgtcaacgctta

SEQ ID NO: 17704 - DNA, 20 bp, synthetic construct
  misc_feature 1..20: note = Synthetic construct
  source 1..20: mol_type = other DNA
gtagggaacgtcaacgctta

SEQ ID NO: 17705 - DNA, 20 bp, synthetic construct
  misc_feature 1..20: note = Synthetic construct
  source 1..20: mol_type = other DNA
gtagggaccgtcaacgctta

SEQ ID NO: 17706 - DNA, 20 bp, synthetic construct
  misc_feature 1..20: note = Synthetic construct
  source 1..20: mol_type = other DNA
gtagggatcgtcaacgctta

SEQ ID NO: 17707 - DNA, 20 bp, synthetic construct
  misc_feature 1..20: note = Synthetic construct
  source 1..20: mol_type = other DNA
gtagggagagtcaacgctta

SEQ ID NO: 17708 - DNA, 20 bp, synthetic construct
  misc_feature 1..20: note = Synthetic construct
  source 1..20: mol_type = other DNA
gtagggagggtcaacgctta

SEQ ID NO: 17709 - DNA, 20 bp, synthetic construct
  misc_feature 1..20: note = Synthetic construct
  source 1..20: mol_type = other DNA
gtagggagtgtcaacgctta

SEQ ID NO: 17710 - DNA, 20 bp, synthetic construct
  misc_feature 1..20: note = Synthetic construct
  source 1..20: mol_type = other DNA
gtagggagcatcaacgctta

SEQ ID NO: 17711 - DNA, 20 bp, synthetic construct
  misc_feature 1..20: note = Synthetic construct
  source 1..20: mol_type = other DNA
gtagggagcctcaacgctta

SEQ ID NO: 17712 - DNA, 20 bp, synthetic construct
  misc_feature 1..20: note = Synthetic construct
  source 1..20: mol_type = other DNA
gtagggagcttcaacgctta

SEQ ID NO: 17713 - DNA, 20 bp, synthetic construct
  misc_feature 1..20: note = Synthetic construct
  source 1..20: mol_type = other DNA
gtagggagcgacaacgctta

SEQ ID NO: 17714 - DNA, 20 bp, synthetic construct
  misc_feature 1..20: note = Synthetic construct
  source 1..20: mol_type = other DNA
gtagggagcgccaacgctta

SEQ ID NO: 17715 - DNA, 20 bp, synthetic construct
  misc_feature 1..20: note = Synthetic construct
  source 1..20: mol_type = other DNA
gtagggagcggcaacgctta

SEQ ID NO: 17716 - DNA, 20 bp, synthetic construct
  misc_feature 1..20: note = Synthetic construct
  source 1..20: mol_type = other DNA
gtagggagcgtaaacgctta

SEQ ID NO: 17717 - DNA, 20 bp, synthetic construct
  misc_feature 1..20: note = Synthetic construct
  source 1..20: mol_type = other DNA
gtagggagcgtgaacgctta

SEQ ID NO: 17718 - DNA, 20 bp, synthetic construct
  misc_feature 1..20: note = Synthetic construct
  source 1..20: mol_type = other DNA
gtagggagcgttaacgctta

SEQ ID NO: 17719 - DNA, 20 bp, synthetic construct
  misc_feature 1..20: note = Synthetic construct
  source 1..20: mol_type = other DNA
gtagggagcgtccacgctta

SEQ ID NO: 17720 - DNA, 20 bp, synthetic construct
  misc_feature 1..20: note = Synthetic construct
  source 1..20: mol_type = other DNA
gtagggagcgtcgacgctta

SEQ ID NO: 17721 - DNA, 20 bp, synthetic construct
  misc_feature 1..20: note = Synthetic construct
  source 1..20: mol_type = other DNA
gtagggagcgtctacgctta

SEQ ID NO: 17722 - DNA, 20 bp, synthetic construct
  misc_feature 1..20: note = Synthetic construct
  source 1..20: mol_type = other DNA
gtagggagcgtcaccgctta

SEQ ID NO: 17723 - DNA, 20 bp, synthetic construct
  misc_feature 1..20: note = Synthetic construct
  source 1..20: mol_type = other DNA
gtagggagcgtcagcgctta

SEQ ID NO: 17724 - DNA, 20 bp, synthetic construct
  misc_feature 1..20: note = Synthetic construct
  source 1..20: mol_type = other DNA
gtagggagcgtcatcgctta

SEQ ID NO: 17725 - DNA, 20 bp, synthetic construct
  misc_feature 1..20: note = Synthetic construct
  source 1..20: mol_type = other DNA
gtagggagcgtcaaagctta

SEQ ID NO: 17726 - DNA, 20 bp, synthetic construct
  misc_feature 1..20: note = Synthetic construct
  source 1..20: mol_type = other DNA
gtagggagcgtcaaggctta

SEQ ID NO: 17727 - DNA, 20 bp, synthetic construct
  misc_feature 1..20: note = Synthetic construct
  source 1..20: mol_type = other DNA
gtagggagcgtcaatgctta

SEQ ID NO: 17728 - DNA, 20 bp, synthetic construct
  misc_feature 1..20: note = Synthetic construct
  source 1..20: mol_type = other DNA
gtagggagcgtcaacactta

SEQ ID NO: 17729 - DNA, 20 bp, synthetic construct
  misc_feature 1..20: note = Synthetic construct
  source 1..20: mol_type = other DNA
gtagggagcgtcaaccctta

SEQ ID NO: 17730 - DNA, 20 bp, synthetic construct
  misc_feature 1..20: note = Synthetic construct
  source 1..20: mol_type = other DNA
gtagggagcgtcaactctta

SEQ ID NO: 17731 - DNA, 20 bp, synthetic construct
  misc_feature 1..20: note = Synthetic construct
  source 1..20: mol_type = other DNA
gtagggagcgtcaacgatta

SEQ ID NO: 17732 - DNA, 20 bp, synthetic construct
  misc_feature 1..20: note = Synthetic construct
  source 1..20: mol_type = other DNA
gtagggagcgtcaacggtta

SEQ ID NO: 17733 - DNA, 20 bp, synthetic construct
  misc_feature 1..20: note = Synthetic construct
  source 1..20: mol_type = other DNA
gtagggagcgtcaacgttta

SEQ ID NO: 17734 - DNA, 20 bp, synthetic construct
  misc_feature 1..20: note = Synthetic construct
  source 1..20: mol_type = other DNA
gtagggagcgtcaacgcata

SEQ ID NO: 17735 - DNA, 20 bp, synthetic construct
  misc_feature 1..20: note = Synthetic construct
  source 1..20: mol_type = other DNA
gtagggagcgtcaacgccta

SEQ ID NO: 17736 - DNA, 20 bp, synthetic construct
  misc_feature 1..20: note = Synthetic construct
  source 1..20: mol_type = other DNA
gtagggagcgtcaacgcgta

SEQ ID NO: 17737 - DNA, 20 bp, synthetic construct
  misc_feature 1..20: note = Synthetic construct
  source 1..20: mol_type = other DNA
gtagggagcgtcaacgctaa

SEQ ID NO: 17738 - DNA, 20 bp, synthetic construct
  misc_feature 1..20: note = Synthetic construct
  source 1..20: mol_type = other DNA
gtagggagcgtcaacgctca

SEQ ID NO: 17739 - DNA, 20 bp, synthetic construct
  misc_feature 1..20: note = Synthetic construct
  source 1..20: mol_type = other DNA
gtagggagcgtcaacgctga

SEQ ID NO: 17740 - DNA, 20 bp, synthetic construct
  misc_feature 1..20: note = Synthetic construct
  source 1..20: mol_type = other DNA
gtagggagcgtcaacgcttc

SEQ ID NO: 17741 - DNA, 20 bp, synthetic construct
  misc_feature 1..20: note = Synthetic construct
  source 1..20: mol_type = other DNA
gtagggagcgtcaacgcttg

SEQ ID NO: 17742 - DNA, 20 bp, synthetic construct
  misc_feature 1..20: note = Synthetic construct
  source 1..20: mol_type = other DNA
gtagggagcgtcaacgcttt

SEQ ID NO: 17743 - DNA, 22 bp, synthetic construct
  misc_feature 1..22: note = Synthetic construct
  source 1..22: mol_type = other DNA
ataacggttgcttgttcagcga

SEQ ID NO: 17744 - DNA, 22 bp, synthetic construct
  misc_feature 1..22: note = Synthetic construct
  source 1..22: mol_type = other DNA
ctaacggttgcttgttcagcga

SEQ ID NO: 17745 - DNA, 22 bp, synthetic construct
  misc_feature 1..22: note = Synthetic construct
  source 1..22: mol_type = other DNA
ttaacggttgcttgttcagcga

SEQ ID NO: 17746 - DNA, 22 bp, synthetic construct
  misc_feature 1..22: note = Synthetic construct
  source 1..22: mol_type = other DNA
gaaacggttgcttgttcagcga

SEQ ID NO: 17747 - DNA, 22 bp, synthetic construct
  misc_feature 1..22: note = Synthetic construct
  source 1..22: mol_type = other DNA
gcaacggttgcttgttcagcga

SEQ ID NO: 17748 - DNA, 22 bp, synthetic construct
  misc_feature 1..22: note = Synthetic construct
  source 1..22: mol_type = other DNA
ggaacggttgcttgttcagcga

SEQ ID NO: 17749 - DNA, 22 bp, synthetic construct
  misc_feature 1..22: note = Synthetic construct
  source 1..22: mol_type = other DNA
gtcacggttgcttgttcagcga

SEQ ID NO: 17750 - DNA, 22 bp, synthetic construct
  misc_feature 1..22: note = Synthetic construct
  source 1..22: mol_type = other DNA
gtgacggttgcttgttcagcga

SEQ ID NO: 17751 - DNA, 22 bp, synthetic construct
  misc_feature 1..22: note = Synthetic construct
  source 1..22: mol_type = other DNA
gttacggttgcttgttcagcga

SEQ ID NO: 17752 - DNA, 22 bp, synthetic construct
  misc_feature 1..22: note = Synthetic construct
  source 1..22: mol_type = other DNA
gtaccggttgcttgttcagcga

SEQ ID NO: 17753 - DNA, 22 bp, synthetic construct
  misc_feature 1..22: note = Synthetic construct
  source 1..22: mol_type = other DNA
gtagcggttgcttgttcagcga

SEQ ID NO: 17754 - DNA, 22 bp, synthetic construct
  misc_feature 1..22: note = Synthetic construct
  source 1..22: mol_type = other DNA
gtatcggttgcttgttcagcga

SEQ ID NO: 17755 - DNA, 22 bp, synthetic construct
  misc_feature 1..22: note = Synthetic construct
  source 1..22: mol_type = other DNA
gtaaaggttgcttgttcagcga

SEQ ID NO: 17756 - DNA, 22 bp, synthetic construct
  misc_feature 1..22: note = Synthetic construct
  source 1..22: mol_type = other DNA
gtaagggttgcttgttcagcga

SEQ ID NO: 17757 - DNA, 22 bp, synthetic construct
  misc_feature 1..22: note = Synthetic construct
  source 1..22: mol_type = other DNA
gtaatggttgcttgttcagcga

SEQ ID NO: 17758 - DNA, 22 bp, synthetic construct
  misc_feature 1..22: note = Synthetic construct
  source 1..22: mol_type = other DNA
gtaacagttgcttgttcagcga

SEQ ID NO: 17759 - DNA, 22 bp, synthetic construct
  misc_feature 1..22: note = Synthetic construct
  source 1..22: mol_type = other DNA
gtaaccgttgcttgttcagcga

SEQ ID NO: 17760 - DNA, 22 bp, synthetic construct
  misc_feature 1..22: note = Synthetic construct
  source 1..22: mol_type = other DNA
gtaactgttgcttgttcagcga

SEQ ID NO: 17761 - DNA, 22 bp, synthetic construct
  misc_feature 1..22: note = Synthetic construct
  source 1..22: mol_type = other DNA
gtaacgattgcttgttcagcga

SEQ ID NO: 17762 - DNA, 22 bp, synthetic construct
  misc_feature 1..22: note = Synthetic construct
  source 1..22: mol_type = other DNA
gtaacgcttgcttgttcagcga

SEQ ID NO: 17763 - DNA, 22 bp, synthetic construct
  misc_feature 1..22: note = Synthetic construct
  source 1..22: mol_type = other DNA
gtaacgtttgcttgttcagcga

SEQ ID NO: 17764 - DNA, 22 bp, synthetic construct
  misc_feature 1..22: note = Synthetic construct
  source 1..22: mol_type = other DNA
gtaacggatgcttgttcagcga

SEQ ID NO: 17765 - DNA, 22 bp, synthetic construct
  misc_feature 1..22: note = Synthetic construct
  source 1..22: mol_type = other DNA
gtaacggctgcttgttcagcga

SEQ ID NO: 17766 - DNA, 22 bp, synthetic construct
  misc_feature 1..22: note = Synthetic construct
  source 1..22: mol_type = other DNA
gtaacgggtgcttgttcagcga

SEQ ID NO: 17767 - DNA, 22 bp, synthetic construct
  misc_feature 1..22: note = Synthetic construct
  source 1..22: mol_type = other DNA
gtaacggtagcttgttcagcga

SEQ ID NO: 17768 - DNA, 22 bp, synthetic construct
  misc_feature 1..22: note = Synthetic construct
  source 1..22: mol_type = other DNA
gtaacggtcgcttgttcagcga

SEQ ID NO: 17769 - DNA, 22 bp, synthetic construct
  misc_feature 1..22: note = Synthetic construct
  source 1..22: mol_type = other DNA
gtaacggtggcttgttcagcga

SEQ ID NO: 17770 - DNA, 22 bp, synthetic construct
  misc_feature 1..22: note = Synthetic construct
  source 1..22: mol_type = other DNA
gtaacggttacttgttcagcga

SEQ ID NO: 17771 - DNA, 22 bp, synthetic construct
  misc_feature 1..22: note = Synthetic construct
  source 1..22: mol_type = other DNA
gtaacggttccttgttcagcga

SEQ ID NO: 17772 - DNA, 22 bp, synthetic construct
  misc_feature 1..22: note = Synthetic construct
  source 1..22: mol_type = other DNA
gtaacggtttcttgttcagcga

SEQ ID NO: 17773 - DNA, 22 bp, synthetic construct
  misc_feature 1..22: note = Synthetic construct
  source 1..22: mol_type = other DNA
gtaacggttgattgttcagcga

SEQ ID NO: 17774 - DNA, 22 bp, synthetic construct
  misc_feature 1..22: note = Synthetic construct
  source 1..22: mol_type = other DNA
gtaacggttggttgttcagcga

SEQ ID NO: 17775 - DNA, 22 bp, synthetic construct
  misc_feature 1..22: note = Synthetic construct
  source 1..22: mol_type = other DNA
gtaacggttgtttgttcagcga

SEQ ID NO: 17776 - DNA, 22 bp, synthetic construct
  misc_feature 1..22: note = Synthetic construct
  source 1..22: mol_type = other DNA
gtaacggttgcatgttcagcga

SEQ ID NO: 17777 - DNA, 22 bp, synthetic construct
  misc_feature 1..22: note = Synthetic construct
  source 1..22: mol_type = other DNA
gtaacggttgcctgttcagcga

SEQ ID NO: 17778 - DNA, 22 bp, synthetic construct
  misc_feature 1..22: note = Synthetic construct
  source 1..22: mol_type = other DNA
gtaacggttgcgtgttcagcga

SEQ ID NO: 17779 - DNA, 22 bp, synthetic construct
  misc_feature 1..22: note = Synthetic construct
  source 1..22: mol_type = other DNA
gtaacggttgctagttcagcga

SEQ ID NO: 17780 - DNA, 22 bp, synthetic construct
  misc_feature 1..22: note = Synthetic construct
  source 1..22: mol_type = other DNA
gtaacggttgctcgttcagcga

SEQ ID NO: 17781 - DNA, 22 bp, synthetic construct
  misc_feature 1..22: note = Synthetic construct
  source 1..22: mol_type = other DNA
gtaacggttgctggttcagcga

SEQ ID NO: 17782 - DNA, 22 bp, synthetic construct
  misc_feature 1..22: note = Synthetic construct
  source 1..22: mol_type = other DNA
gtaacggttgcttattcagcga

SEQ ID NO: 17783 - DNA, 22 bp, synthetic construct
  misc_feature 1..22: note = Synthetic construct
  source 1..22: mol_type = other DNA
gtaacggttgcttcttcagcga

SEQ ID NO: 17784 - DNA, 22 bp, synthetic construct
  misc_feature 1..22: note = Synthetic construct
  source 1..22: mol_type = other DNA
gtaacggttgctttttcagcga

SEQ ID NO: 17785 - DNA, 22 bp, synthetic construct
  misc_feature 1..22: note = Synthetic construct
  source 1..22: mol_type = other DNA
gtaacggttgcttgatcagcga

SEQ ID NO: 17786 - DNA, 22 bp, synthetic construct
  misc_feature 1..22: note = Synthetic construct
  source 1..22: mol_type = other DNA
gtaacggttgcttgctcagcga

SEQ ID NO: 17787 - DNA, 22 bp, synthetic construct
  misc_feature 1..22: note = Synthetic construct
  source 1..22: mol_type = other DNA
gtaacggttgcttggtcagcga

SEQ ID NO: 17788 - DNA, 22 bp, synthetic construct
  misc_feature 1..22: note = Synthetic construct
  source 1..22: mol_type = other DNA
gtaacggttgcttgtacagcga

SEQ ID NO: 17789 - DNA, 22 bp, synthetic construct
  misc_feature 1..22: note = Synthetic construct
  source 1..22: mol_type = other DNA
gtaacggttgcttgtccagcga

SEQ ID NO: 17790 - DNA, 22 bp, synthetic construct
  misc_feature 1..22: note = Synthetic construct
  source 1..22: mol_type = other DNA
gtaacggttgcttgtgcagcga

SEQ ID NO: 17791 - DNA, 22 bp, synthetic construct
  misc_feature 1..22: note = Synthetic construct
  source 1..22: mol_type = other DNA
gtaacggttgcttgttaagcga

SEQ ID NO: 17792 - DNA, 22 bp, synthetic construct
  misc_feature 1..22: note = Synthetic construct
  source 1..22: mol_type = other DNA
gtaacggttgcttgttgagcga

SEQ ID NO: 17793 - DNA, 22 bp, synthetic construct
  misc_feature 1..22: note = Synthetic construct
  source 1..22: mol_type = other DNA
gtaacggttgcttgtttagcga

SEQ ID NO: 17794 - DNA, 22 bp, synthetic construct
  misc_feature 1..22: note = Synthetic construct
  source 1..22: mol_type = other DNA
gtaacggttgcttgttccgcga

SEQ ID NO: 17795 - DNA, 22 bp, synthetic construct
  misc_feature 1..22: note = Synthetic construct
  source 1..22: mol_type = other DNA
gtaacggttgcttgttcggcga

SEQ ID NO: 17796 - DNA, 22 bp, synthetic construct
  misc_feature 1..22: note = Synthetic construct
  source 1..22: mol_type = other DNA
gtaacggttgcttgttctgcga

SEQ ID NO: 17797 - DNA, 22 bp, synthetic construct
  misc_feature 1..22: note = Synthetic construct
  source 1..22: mol_type = other DNA
gtaacggttgcttgttcaacga

SEQ ID NO: 17798 - DNA, 22 bp, synthetic construct
  misc_feature 1..22: note = Synthetic construct
  source 1..22: mol_type = other DNA
gtaacggttgcttgttcaccga

SEQ ID NO: 17799 - DNA, 22 bp, synthetic construct
  misc_feature 1..22: note = Synthetic construct
  source 1..22: mol_type = other DNA
gtaacggttgcttgttcatcga

SEQ ID NO: 17800 - DNA, 22 bp, synthetic construct
  misc_feature 1..22: note = Synthetic construct
  source 1..22: mol_type = other DNA
gtaacggttgcttgttcagaga

SEQ ID NO: 17801 - DNA, 22 bp, synthetic construct
  misc_feature 1..22: note = Synthetic construct
  source 1..22: mol_type = other DNA
gtaacggttgcttgttcaggga

SEQ ID NO: 17802 - DNA, 22 bp, synthetic construct
  misc_feature 1..22: note = Synthetic construct
  source 1..22: mol_type = other DNA
gtaacggttgcttgttcagtga

SEQ ID NO: 17803 - DNA, 22 bp, synthetic construct
  misc_feature 1..22: note = Synthetic construct
  source 1..22: mol_type = other DNA
gtaacggttgcttgttcagcaa

SEQ ID NO: 17804 - DNA, 22 bp, synthetic construct
  misc_feature 1..22: note = Synthetic construct
  source 1..22: mol_type = other DNA
gtaacggttgcttgttcagcca

SEQ ID NO: 17805 - DNA, 22 bp, synthetic construct
  misc_feature 1..22: note = Synthetic construct
  source 1..22: mol_type = other DNA
gtaacggttgcttgttcagcta

SEQ ID NO: 17806 - DNA, 22 bp, synthetic construct
  misc_feature 1..22: note = Synthetic construct
  source 1..22: mol_type = other DNA
gtaacggttgcttgttcagcgc

SEQ ID NO: 17807 - DNA, 22 bp, synthetic construct
  misc_feature 1..22: note = Synthetic construct
  source 1..22: mol_type = other DNA
gtaacggttgcttgttcagcgg

SEQ ID NO: 17808 - DNA, 22 bp, synthetic construct
  misc_feature 1..22: note = Synthetic construct
  source 1..22: mol_type = other DNA
gtaacggttgcttgttcagcgt

SEQ ID NO: 17809 - DNA, 23 bp, synthetic construct
  misc_feature 1..23: note = Synthetic construct
  source 1..23: mol_type = other DNA
atatggttccggcgttaccaaaa

SEQ ID NO: 17810 - DNA, 23 bp, synthetic construct
  misc_feature 1..23: note = Synthetic construct
  source 1..23: mol_type = other DNA
gtatggttccggcgttaccaaaa

SEQ ID NO: 17811 - DNA, 23 bp, synthetic construct
  misc_feature 1..23: note = Synthetic construct
  source 1..23: mol_type = other DNA
ttatggttccggcgttaccaaaa

SEQ ID NO: 17812 - DNA, 23 bp, synthetic construct
  misc_feature 1..23: note = Synthetic construct
  source 1..23: mol_type = other DNA
caatggttccggcgttaccaaaa

SEQ ID NO: 17813 - DNA, 23 bp, synthetic construct
  misc_feature 1..23: note = Synthetic construct
  source 1..23: mol_type = other DNA
ccatggttccggcgttaccaaaa

SEQ ID NO: 17814 - DNA, 23 bp, synthetic construct
  misc_feature 1..23: note = Synthetic construct
  source 1..23: mol_type = other DNA
cgatggttccggcgttaccaaaa

SEQ ID NO: 17815 - DNA, 23 bp, synthetic construct
  misc_feature 1..23: note = Synthetic construct
  source 1..23: mol_type = other DNA
ctctggttccggcgttaccaaaa

SEQ ID NO: 17816 - DNA, 23 bp, synthetic construct
  misc_feature 1..23: note = Synthetic construct
  source 1..23: mol_type = other DNA
ctgtggttccggcgttaccaaaa

SEQ ID NO: 17817 - DNA, 23 bp, synthetic construct
  misc_feature 1..23: note = Synthetic construct
  source 1..23: mol_type = other DNA
ctttggttccggcgttaccaaaa

SEQ ID NO: 17818 - DNA, 23 bp, synthetic construct
  misc_feature 1..23: note = Synthetic construct
  source 1..23: mol_type = other DNA
ctaaggttccggcgttaccaaaa

SEQ ID NO: 17819 - DNA, 23 bp, synthetic construct
  misc_feature 1..23: note = Synthetic construct
  source 1..23: mol_type = other DNA
ctacggttccggcgttaccaaaa

SEQ ID NO: 17820 - DNA, 23 bp, synthetic construct
  misc_feature 1..23: note = Synthetic construct
  source 1..23: mol_type = other DNA
ctagggttccggcgttaccaaaa

SEQ ID NO: 17821 - DNA, 23 bp, synthetic construct
  misc_feature 1..23: note = Synthetic construct
  source 1..23: mol_type = other DNA
ctatagttccggcgttaccaaaa

SEQ ID NO: 17822 - DNA, 23 bp, synthetic construct
  misc_feature 1..23: note = Synthetic construct
  source 1..23: mol_type = other DNA
ctatcgttccggcgttaccaaaa

SEQ ID NO: 17823 - DNA, 23 bp, synthetic construct
  misc_feature 1..23: note = Synthetic construct
  source 1..23: mol_type = other DNA
ctattgttccggcgttaccaaaa

SEQ ID NO: 17824 - DNA, 23 bp, synthetic construct
  misc_feature 1..23: note = Synthetic construct
  source 1..23: mol_type = other DNA
ctatgattccggcgttaccaaaa

SEQ ID NO: 17825 - DNA, 23 bp, synthetic construct
  misc_feature 1..23: note = Synthetic construct
  source 1..23: mol_type = other DNA
ctatgcttccggcgttaccaaaa

SEQ ID NO: 17826 - DNA, 23 bp, synthetic construct
  misc_feature 1..23: note = Synthetic construct
  source 1..23: mol_type = other DNA
ctatgtttccggcgttaccaaaa

SEQ ID NO: 17827 - DNA, 23 bp, synthetic construct
  misc_feature 1..23: note = Synthetic construct
  source 1..23: mol_type = other DNA
ctatggatccggcgttaccaaaa

SEQ ID NO: 17828 - DNA, 23 bp, synthetic construct
  misc_feature 1..23: note = Synthetic construct
  source 1..23: mol_type = other DNA
ctatggctccggcgttaccaaaa

SEQ ID NO: 17829 - DNA, 23 bp, synthetic construct
  misc_feature 1..23: note = Synthetic construct
  source 1..23: mol_type = other DNA
ctatgggtccggcgttaccaaaa

SEQ ID NO: 17830 - DNA, 23 bp, synthetic construct
  misc_feature 1..23: note = Synthetic construct
  source 1..23: mol_type = other DNA
ctatggtaccggcgttaccaaaa

SEQ ID NO: 17831 - DNA, 23 bp, synthetic construct
  misc_feature 1..23: note = Synthetic construct
  source 1..23: mol_type = other DNA
ctatggtcccggcgttaccaaaa

SEQ ID NO: 17832 - DNA, 23 bp, synthetic construct
  misc_feature 1..23: note = Synthetic construct
  source 1..23: mol_type = other DNA
ctatggtgccggcgttaccaaaa

SEQ ID NO: 17833 - DNA, 23 bp, synthetic construct
  misc_feature 1..23: note = Synthetic construct
  source 1..23: mol_type = other DNA
ctatggttacggcgttaccaaaa

SEQ ID NO: 17834 - DNA, 23 bp, synthetic construct
  misc_feature 1..23: note = Synthetic construct
  source 1..23: mol_type = other DNA
ctatggttgcggcgttaccaaaa

SEQ ID NO: 17835 - DNA, 23 bp, synthetic construct
  misc_feature 1..23: note = Synthetic construct
  source 1..23: mol_type = other DNA
ctatggtttcggcgttaccaaaa

SEQ ID NO: 17836 - DNA, 23 bp, synthetic construct
  misc_feature 1..23: note = Synthetic construct
  source 1..23: mol_type = other DNA
ctatggttcaggcgttaccaaaa

SEQ ID NO: 17837 - DNA, 23 bp, synthetic construct
  misc_feature 1..23: note = Synthetic construct
  source 1..23: mol_type = other DNA
ctatggttcgggcgttaccaaaa

SEQ ID NO: 17838 - DNA, 23 bp, synthetic construct
  misc_feature 1..23: note = Synthetic construct
  source 1..23: mol_type = other DNA
ctatggttctggcgttaccaaaa

SEQ ID NO: 17839 - DNA, 23 bp, synthetic construct
  misc_feature 1..23: note = Synthetic construct
  source 1..23: mol_type = other DNA
ctatggttccagcgttaccaaaa

SEQ ID NO: 17840 - DNA, 23 bp, synthetic construct
  misc_feature 1..23: note = Synthetic construct
  source 1..23: mol_type = other DNA
ctatggttcccgcgttaccaaaa

SEQ ID NO: 17841 - DNA, 23 bp, synthetic construct
  misc_feature 1..23: note = Synthetic construct
  source 1..23: mol_type = other DNA
ctatggttcctgcgttaccaaaa

SEQ ID NO: 17842 - DNA, 23 bp, synthetic construct
  misc_feature 1..23: note = Synthetic construct
  source 1..23: mol_type = other DNA
ctatggttccgacgttaccaaaa

SEQ ID NO: 17843 - DNA, 23 bp, synthetic construct
  misc_feature 1..23: note = Synthetic construct
  source 1..23: mol_type = other DNA
ctatggttccgccgttaccaaaa

SEQ ID NO: 17844 - DNA, 23 bp, synthetic construct
  misc_feature 1..23: note = Synthetic construct
  source 1..23: mol_type = other DNA
ctatggttccgtcgttaccaaaa

SEQ ID NO: 17845 - DNA, 23 bp, synthetic construct
  misc_feature 1..23: note = Synthetic construct
  source 1..23: mol_type = other DNA
ctatggttccggagttaccaaaa

SEQ ID NO: 17846 - DNA, 23 bp, synthetic construct
  misc_feature 1..23: note = Synthetic construct
  source 1..23: mol_type = other DNA
ctatggttccggggttaccaaaa

SEQ ID NO: 17847 - DNA, 23 bp, synthetic construct
  misc_feature 1..23: note = Synthetic construct
  source 1..23: mol_type = other DNA
ctatggttccggtgttaccaaaa

SEQ ID NO: 17848 - DNA, 23 bp, synthetic construct
  misc_feature 1..23: note = Synthetic construct
  source 1..23: mol_type = other DNA
ctatggttccggcattaccaaaa

SEQ ID NO: 17849 - DNA, 23 bp, synthetic construct
  misc_feature 1..23: note = Synthetic construct
  source 1..23: mol_type = other DNA
ctatggttccggccttaccaaaa

SEQ ID NO: 17850 - DNA, 23 bp, synthetic construct
  misc_feature 1..23: note = Synthetic construct
  source 1..23: mol_type = other DNA
ctatggttccggctttaccaaaa

SEQ ID NO: 17851 - DNA, 23 bp, synthetic construct
  misc_feature 1..23: note = Synthetic construct
  source 1..23: mol_type = other DNA
ctatggttccggcgataccaaaa

SEQ ID NO: 17852 - DNA, 23 bp, synthetic construct
  misc_feature 1..23: note = Synthetic construct
  source 1..23: mol_type = other DNA
ctatggttccggcgctaccaaaa

SEQ ID NO: 17853 - DNA, 23 bp, synthetic construct
  misc_feature 1..23: note = Synthetic construct
  source 1..23: mol_type = other DNA
ctatggttccggcggtaccaaaa

SEQ ID NO: 17854 - DNA, 23 bp, synthetic construct
  misc_feature 1..23: note = Synthetic construct
  source 1..23: mol_type = other DNA
ctatggttccggcgtaaccaaaa

SEQ ID NO: 17855 - DNA, 23 bp, synthetic construct
  misc_feature 1..23: note = Synthetic construct
  source 1..23: mol_type = other DNA
ctatggttccggcgtcaccaaaa

SEQ ID NO: 17856 - DNA, 23 bp, synthetic construct
  misc_feature 1..23: note = Synthetic construct
  source 1..23: mol_type = other DNA
ctatggttccggcgtgaccaaaa

SEQ ID NO: 17857 - DNA, 23 bp, synthetic construct
  misc_feature 1..23: note = Synthetic construct
  source 1..23: mol_type = other DNA
ctatggttccggcgttcccaaaa

SEQ ID NO: 17858 - DNA, 23 bp, synthetic construct
  misc_feature 1..23: note = Synthetic construct
  source 1..23: mol_type = other DNA
ctatggttccggcgttgccaaaa

SEQ ID NO: 17859 - DNA, 23 bp, synthetic construct
  misc_feature 1..23: note = Synthetic construct
  source 1..23: mol_type = other DNA
ctatggttccggcgtttccaaaa

SEQ ID NO: 17860 - DNA, 23 bp, synthetic construct
  misc_feature 1..23: note = Synthetic construct
  source 1..23: mol_type = other DNA
ctatggttccggcgttaacaaaa

SEQ ID NO: 17861 - DNA, 23 bp, synthetic construct
  misc_feature 1..23: note = Synthetic construct
  source 1..23: mol_type = other DNA
ctatggttccggcgttagcaaaa

SEQ ID NO: 17862 - DNA, 23 bp, synthetic construct
  misc_feature 1..23: note = Synthetic construct
  source 1..23: mol_type = other DNA
ctatggttccggcgttatcaaaa

SEQ ID NO: 17863 - DNA, 23 bp, synthetic construct
  misc_feature 1..23: note = Synthetic construct
  source 1..23: mol_type = other DNA
ctatggttccggcgttacaaaaa

SEQ ID NO: 17864 - DNA, 23 bp, synthetic construct
  misc_feature 1..23: note = Synthetic construct
  source 1..23: mol_type = other DNA
ctatggttccggcgttacgaaaa

SEQ ID NO: 17865 - DNA, 23 bp, synthetic construct
  misc_feature 1..23: note = Synthetic construct
  source 1..23: mol_type = other DNA
ctatggttccggcgttactaaaa

SEQ ID NO: 17866 - DNA, 23 bp, synthetic construct
  misc_feature 1..23: note = Synthetic construct
  source 1..23: mol_type = other DNA
ctatggttccggcgttacccaaa

SEQ ID NO: 17867 - DNA, 23 bp, synthetic construct
  misc_feature 1..23: note = Synthetic construct
  source 1..23: mol_type = other DNA
ctatggttccggcgttaccgaaa

SEQ ID NO: 17868 - DNA, 23 bp, synthetic construct
  misc_feature 1..23: note = Synthetic construct
  source 1..23: mol_type = other DNA
ctatggttccggcgttacctaaa

SEQ ID NO: 17869 - DNA, 23 bp, synthetic construct
  misc_feature 1..23: note = Synthetic construct
  source 1..23: mol_type = other DNA
ctatggttccggcgttaccacaa

SEQ ID NO: 17870 - DNA, 23 bp, synthetic construct
  misc_feature 1..23: note = Synthetic construct
  source 1..23: mol_type = other DNA
ctatggttccggcgttaccagaa

SEQ ID NO: 17871 - DNA, 23 bp, synthetic construct
  misc_feature 1..23: note = Synthetic construct
  source 1..23: mol_type = other DNA
ctatggttccggcgttaccataa

SEQ ID NO: 17872 - DNA, 23 bp, synthetic construct
  misc_feature 1..23: note = Synthetic construct
  source 1..23: mol_type = other DNA
ctatggttccggcgttaccaaca

SEQ ID NO: 17873 - DNA, 23 bp, synthetic construct
  misc_feature 1..23: note = Synthetic construct
  source 1..23: mol_type = other DNA
ctatggttccggcgttaccaaga

SEQ ID NO: 17874 - DNA, 23 bp, synthetic construct
  misc_feature 1..23: note = Synthetic construct
  source 1..23: mol_type = other DNA
ctatggttccggcgttaccaata

SEQ ID NO: 17875 - DNA, 23 bp, synthetic construct
  misc_feature 1..23: note = Synthetic construct
  source 1..23: mol_type = other DNA
ctatggttccggcgttaccaaac

SEQ ID NO: 17876 - DNA, 23 bp, synthetic construct
  misc_feature 1..23: note = Synthetic construct
  source 1..23: mol_type = other DNA
ctatggttccggcgttaccaaag

SEQ ID NO: 17877 - DNA, 23 bp, synthetic construct
  misc_feature 1..23: note = Synthetic construct
  source 1..23: mol_type = other DNA
ctatggttccggcgttaccaaat

SEQ ID NO: 17878 - DNA, 23 bp, synthetic construct
  misc_feature 1..23: note = Synthetic construct
  source 1..23: mol_type = other DNA
agaggggacgaaggtctcgttct

SEQ ID NO: 17879 - DNA, 23 bp, synthetic construct
  misc_feature 1..23: note = Synthetic construct
  source 1..23: mol_type = other DNA
cgaggggacgaaggtctcgttct

SEQ ID NO: 17880 - DNA, 23 bp, synthetic construct
  misc_feature 1..23: note = Synthetic construct
  source 1..23: mol_type = other DNA
tgaggggacgaaggtctcgttct

SEQ ID NO: 17881 - DNA, 23 bp, synthetic construct
  misc_feature 1..23: note = Synthetic construct
  source 1..23: mol_type = other DNA
gaaggggacgaaggtctcgttct

SEQ ID NO: 17882 - DNA, 23 bp, synthetic construct
  misc_feature 1..23: note = Synthetic construct
  source 1..23: mol_type = other DNA
gcaggggacgaaggtctcgttct

SEQ ID NO: 17883 - DNA, 23 bp, synthetic construct
  misc_feature 1..23: note = Synthetic construct
  source 1..23: mol_type = other DNA
gtaggggacgaaggtctcgttct

SEQ ID NO: 17884 - DNA, 23 bp, synthetic construct
  misc_feature 1..23: note = Synthetic construct
  source 1..23: mol_type = other DNA
ggcggggacgaaggtctcgttct

SEQ ID NO: 17885 - DNA, 23 bp, synthetic construct
  misc_feature 1..23: note = Synthetic construct
  source 1..23: mol_type = other DNA
gggggggacgaaggtctcgttct

SEQ ID NO: 17886 - DNA, 23 bp, synthetic construct
  misc_feature 1..23: note = Synthetic construct
  source 1..23: mol_type = other DNA
ggtggggacgaaggtctcgttct

SEQ ID NO: 17887 - DNA, 23 bp, synthetic construct
  misc_feature 1..23: note = Synthetic construct
  source 1..23: mol_type = other DNA
ggaagggacgaaggtctcgttct

SEQ ID NO: 17888 - DNA, 23 bp, synthetic construct
  misc_feature 1..23: note = Synthetic construct
  source 1..23: mol_type = other DNA
ggacgggacgaaggtctcgttct

SEQ ID NO: 17889 - DNA, 23 bp, synthetic construct
  misc_feature 1..23: note = Synthetic construct
  source 1..23: mol_type = other DNA
ggatgggacgaaggtctcgttct

SEQ ID NO: 17890 - DNA, 23 bp, synthetic construct
  misc_feature 1..23: note = Synthetic construct
  source 1..23: mol_type = other DNA
ggagaggacgaaggtctcgttct

SEQ ID NO: 17891 - DNA, 23 bp, synthetic construct
  misc_feature 1..23: note = Synthetic construct
  source 1..23: mol_type = other DNA
ggagcggacgaaggtctcgttct

SEQ ID NO: 17892 - DNA, 23 bp, synthetic construct
  misc_feature 1..23: note = Synthetic construct
  source 1..23: mol_type = other DNA
ggagtggacgaaggtctcgttct

SEQ ID NO: 17893 - DNA, 23 bp, synthetic construct
  misc_feature 1..23: note = Synthetic construct
  source 1..23: mol_type = other DNA
ggaggagacgaaggtctcgttct

SEQ ID NO: 17894 - DNA, 23 bp, synthetic construct
  misc_feature 1..23: note = Synthetic construct
  source 1..23: mol_type = other DNA
ggaggcgacgaaggtctcgttct

SEQ ID NO: 17895 - DNA, 23 bp, synthetic construct
  misc_feature 1..23: note = Synthetic construct
  source 1..23: mol_type = other DNA
ggaggtgacgaaggtctcgttct

SEQ ID NO: 17896 - DNA, 23 bp, synthetic construct
  misc_feature 1..23: note = Synthetic construct
  source 1..23: mol_type = other DNA
ggagggaacgaaggtctcgttct

SEQ ID NO: 17897 - DNA, 23 bp, synthetic construct
  misc_feature 1..23: note = Synthetic construct
  source 1..23: mol_type = other DNA
ggagggcacgaaggtctcgttct

SEQ ID NO: 17898 - DNA, 23 bp, synthetic construct
  misc_feature 1..23: note = Synthetic construct
  source 1..23: mol_type = other DNA
ggagggtacgaaggtctcgttct

SEQ ID NO: 17899 - DNA, 23 bp, synthetic construct
  misc_feature 1..23: note = Synthetic construct
  source 1..23: mol_type = other DNA
ggaggggccgaaggtctcgttct

SEQ ID NO: 17900 - DNA, 23 bp, synthetic construct
  misc_feature 1..23: note = Synthetic construct
  source 1..23: mol_type = other DNA
ggagggggcgaaggtctcgttct

SEQ ID NO: 17901 - DNA, 23 bp, synthetic construct
  misc_feature 1..23: note = Synthetic construct
  source 1..23: mol_type = other DNA
ggaggggtcgaaggtctcgttct

SEQ ID NO: 17902 - DNA, 23 bp, synthetic construct
  misc_feature 1..23: note = Synthetic construct
  source 1..23: mol_type = other DNA
ggaggggaagaaggtctcgttct

SEQ ID NO: 17903 - DNA, 23 bp, synthetic construct
  misc_feature 1..23: note = Synthetic construct
  source 1..23: mol_type = other DNA
ggaggggaggaaggtctcgttct

SEQ ID NO: 17904 - DNA, 23 bp, synthetic construct
  misc_feature 1..23: note = Synthetic construct
  source 1..23: mol_type = other DNA
ggaggggatgaaggtctcgttct

SEQ ID NO: 17905 - DNA, 23 bp, synthetic construct
  misc_feature 1..23: note = Synthetic construct
  source 1..23: mol_type = other DNA
ggaggggacaaaggtctcgttct

SEQ ID NO: 17906 - DNA, 23 bp, synthetic construct
  misc_feature 1..23: note = Synthetic construct
  source 1..23: mol_type = other DNA
ggaggggaccaaggtctcgttct

SEQ ID NO: 17907 - DNA, 23 bp, synthetic construct
  misc_feature 1..23: note = Synthetic construct
  source 1..23: mol_type = other DNA
ggaggggactaaggtctcgttct

SEQ ID NO: 17908 - DNA, 23 bp, synthetic construct
  misc_feature 1..23: note = Synthetic construct
  source 1..23: mol_type = other DNA
ggaggggacgcaggtctcgttct

SEQ ID NO: 17909 - DNA, 23 bp, synthetic construct
  misc_feature 1..23: note = Synthetic construct
  source 1..23: mol_type = other DNA
ggaggggacggaggtctcgttct

SEQ ID NO: 17910 - DNA, 23 bp, synthetic construct
  misc_feature 1..23: note = Synthetic construct
  source 1..23: mol_type = other DNA
ggaggggacgtaggtctcgttct

SEQ ID NO: 17911 - DNA, 23 bp, synthetic construct
  misc_feature 1..23: note = Synthetic construct
  source 1..23: mol_type = other DNA
ggaggggacgacggtctcgttct

SEQ ID NO: 17912 - DNA, 23 bp, synthetic construct
  misc_feature 1..23: note = Synthetic construct
  source 1..23: mol_type = other DNA
ggaggggacgagggtctcgttct

SEQ ID NO: 17913 - DNA, 23 bp, synthetic construct
  misc_feature 1..23: note = Synthetic construct
  source 1..23: mol_type = other DNA
ggaggggacgatggtctcgttct

SEQ ID NO: 17914 - DNA, 23 bp, synthetic construct
  misc_feature 1..23: note = Synthetic construct
  source 1..23: mol_type = other DNA
ggaggggacgaaagtctcgttct

SEQ ID NO: 17915 - DNA, 23 bp, synthetic construct
  misc_feature 1..23: note = Synthetic construct
  source 1..23: mol_type = other DNA
ggaggggacgaacgtctcgttct

SEQ ID NO: 17916 - DNA, 23 bp, synthetic construct
  misc_feature 1..23: note = Synthetic construct
  source 1..23: mol_type = other DNA
ggaggggacgaatgtctcgttct

SEQ ID NO: 17917 - DNA, 23 bp, synthetic construct
  misc_feature 1..23: note = Synthetic construct
  source 1..23: mol_type = other DNA
ggaggggacgaagatctcgttct

SEQ ID NO: 17918 - DNA, 23 bp, synthetic construct
  misc_feature 1..23: note = Synthetic construct
  source 1..23: mol_type = other DNA
ggaggggacgaagctctcgttct

SEQ ID NO: 17919 - DNA, 23 bp, synthetic construct
  misc_feature 1..23: note = Synthetic construct
  source 1..23: mol_type = other DNA
ggaggggacgaagttctcgttct

SEQ ID NO: 17920 - DNA, 23 bp, synthetic construct
  misc_feature 1..23: note = Synthetic construct
  source 1..23: mol_type = other DNA
ggaggggacgaaggactcgttct

SEQ ID NO: 17921 - DNA, 23 bp, synthetic construct
  misc_feature 1..23: note = Synthetic construct
  source 1..23: mol_type = other DNA
ggaggggacgaaggcctcgttct

SEQ ID NO: 17922 - DNA, 23 bp, synthetic construct
  misc_feature 1..23: note = Synthetic construct
  source 1..23: mol_type = other DNA
ggaggggacgaagggctcgttct

SEQ ID NO: 17923 - DNA, 23 bp, synthetic construct
  misc_feature 1..23: note = Synthetic construct
  source 1..23: mol_type = other DNA
ggaggggacgaaggtatcgttct

SEQ ID NO: 17924 - DNA, 23 bp, synthetic construct
  misc_feature 1..23: note = Synthetic construct
  source 1..23: mol_type = other DNA
ggaggggacgaaggtgtcgttct

SEQ ID NO: 17925 - DNA, 23 bp, synthetic construct
  misc_feature 1..23: note = Synthetic construct
  source 1..23: mol_type = other DNA
ggaggggacgaaggtttcgttct

SEQ ID NO: 17926 - DNA, 23 bp, synthetic construct
  misc_feature 1..23: note = Synthetic construct
  source 1..23: mol_type = other DNA
ggaggggacgaaggtcacgttct

SEQ ID NO: 17927 - DNA, 23 bp, synthetic construct
  misc_feature 1..23: note = Synthetic construct
  source 1..23: mol_type = other DNA
ggaggggacgaaggtcccgttct

SEQ ID NO: 17928 - DNA, 23 bp, synthetic construct
  misc_feature 1..23: note = Synthetic construct
  source 1..23: mol_type = other DNA
ggaggggacgaaggtcgcgttct

SEQ ID NO: 17929 - DNA, 23 bp, synthetic construct
  misc_feature 1..23: note = Synthetic construct
  source 1..23: mol_type = other DNA
ggaggggacgaaggtctagttct

SEQ ID NO: 17930 - DNA, 23 bp, synthetic construct
  misc_feature 1..23: note = Synthetic construct
  source 1..23: mol_type = other DNA
ggaggggacgaaggtctggttct

SEQ ID NO: 17931 - DNA, 23 bp, synthetic construct
  misc_feature 1..23: note = Synthetic construct
  source 1..23: mol_type = other DNA
ggaggggacgaaggtcttgttct

SEQ ID NO: 17932 - DNA, 23 bp, synthetic construct
  misc_feature 1..23: note = Synthetic construct
  source 1..23: mol_type = other DNA
ggaggggacgaaggtctcattct

SEQ ID NO: 17933 - DNA, 23 bp, synthetic construct
  misc_feature 1..23: note = Synthetic construct
  source 1..23: mol_type = other DNA
ggaggggacgaaggtctccttct

SEQ ID NO: 17934 - DNA, 23 bp, synthetic construct
  misc_feature 1..23: note = Synthetic construct
  source 1..23: mol_type = other DNA
ggaggggacgaaggtctctttct

SEQ ID NO: 17935 - DNA, 23 bp, synthetic construct
  misc_feature 1..23: note = Synthetic construct
  source 1..23: mol_type = other DNA
ggaggggacgaaggtctcgatct

SEQ ID NO: 17936 - DNA, 23 bp, synthetic construct
  misc_feature 1..23: note = Synthetic construct
  source 1..23: mol_type = other DNA
ggaggggacgaaggtctcgctct

SEQ ID NO: 17937 - DNA, 23 bp, synthetic construct
  misc_feature 1..23: note = Synthetic construct
  source 1..23: mol_type = other DNA
ggaggggacgaaggtctcggtct

SEQ ID NO: 17938 - DNA, 23 bp, synthetic construct
  misc_feature 1..23: note = Synthetic construct
  source 1..23: mol_type = other DNA
ggaggggacgaaggtctcgtact

SEQ ID NO: 17939 - DNA, 23 bp, synthetic construct
  misc_feature 1..23: note = Synthetic construct
  source 1..23: mol_type = other DNA
ggaggggacgaaggtctcgtcct

SEQ ID NO: 17940 - DNA, 23 bp, synthetic construct
  misc_feature 1..23: note = Synthetic construct
  source 1..23: mol_type = other DNA
ggaggggacgaaggtctcgtgct

SEQ ID NO: 17941 - DNA, 23 bp, synthetic construct
  misc_feature 1..23: note = Synthetic construct
  source 1..23: mol_type = other DNA
ggaggggacgaaggtctcgttat

SEQ ID NO: 17942 - DNA, 23 bp, synthetic construct
  misc_feature 1..23: note = Synthetic construct
  source 1..23: mol_type = other DNA
ggaggggacgaaggtctcgttgt

SEQ ID NO: 17943 - DNA, 23 bp, synthetic construct
  misc_feature 1..23: note = Synthetic construct
  source 1..23: mol_type = other DNA
ggaggggacgaaggtctcgtttt

SEQ ID NO: 17944 - DNA, 23 bp, synthetic construct
  misc_feature 1..23: note = Synthetic construct
  source 1..23: mol_type = other DNA
ggaggggacgaaggtctcgttca

SEQ ID NO: 17945 - DNA, 23 bp, synthetic construct
  misc_feature 1..23: note = Synthetic construct
  source 1..23: mol_type = other DNA
ggaggggacgaaggtctcgttcc

SEQ ID NO: 17946 - DNA, 23 bp, synthetic construct
  misc_feature 1..23: note = Synthetic construct
  source 1..23: mol_type = other DNA
ggaggggacgaaggtctcgttcg

SEQ ID NO: 17947 - DNA, 20 bp, synthetic construct
  misc_feature 1..20: note = Synthetic construct
  source 1..20: mol_type = other DNA
cctttacgtacgcgccagtt

SEQ ID NO: 17948 - DNA, 20 bp, synthetic construct
  misc_feature 1..20: note = Synthetic construct
  source 1..20: mol_type = other DNA
gctttacgtacgcgccagtt

SEQ ID NO: 17949 - DNA, 20 bp, synthetic construct
  misc_feature 1..20: note = Synthetic construct
  source 1..20: mol_type = other DNA
tctttacgtacgcgccagtt

SEQ ID NO: 17950 - DNA, 20 bp, synthetic construct
  misc_feature 1..20: note = Synthetic construct
  source 1..20: mol_type = other DNA
aatttacgtacgcgccagtt

SEQ ID NO: 17951 - DNA, 20 bp, synthetic construct
  misc_feature 1..20: note = Synthetic construct
  source 1..20: mol_type = other DNA
agtttacgtacgcgccagtt

SEQ ID NO: 17952 - DNA, 20 bp, synthetic construct
  misc_feature 1..20: note = Synthetic construct
  source 1..20: mol_type = other DNA
attttacgtacgcgccagtt

SEQ ID NO: 17953 - DNA, 20 bp, synthetic construct
  misc_feature 1..20: note = Synthetic construct
  source 1..20: mol_type = other DNA
acattacgtacgcgccagtt

SEQ ID NO: 17954 - DNA, 20 bp, synthetic construct
  misc_feature 1..20: note = Synthetic construct
  source 1..20: mol_type = other DNA
accttacgtacgcgccagtt

SEQ ID NO: 17955 - DNA, 20 bp, synthetic construct
  misc_feature 1..20: note = Synthetic construct
  source 1..20: mol_type = other DNA
acgttacgtacgcgccagtt

SEQ ID NO: 17956 - DNA, 20 bp, synthetic construct
  misc_feature 1..20: note = Synthetic construct
  source 1..20: mol_type = other DNA
actatacgtacgcgccagtt

SEQ ID NO: 17957 - DNA, 20 bp, synthetic construct
  misc_feature 1..20: note = Synthetic construct
  source 1..20: mol_type = other DNA
actctacgtacgcgccagtt

SEQ ID NO: 17958 - DNA, 20 bp, synthetic construct
  misc_feature 1..20: note = Synthetic construct
  source 1..20: mol_type = other DNA
actgtacgtacgcgccagtt

SEQ ID NO: 17959 - DNA, 20 bp, synthetic construct
  misc_feature 1..20: note = Synthetic construct
  source 1..20: mol_type = other DNA
acttaacgtacgcgccagtt

SEQ ID NO: 17960 - DNA, 20 bp, synthetic construct
  misc_feature 1..20: note = Synthetic construct
  source 1..20: mol_type = other DNA
acttcacgtacgcgccagtt

SEQ ID NO: 17961 - DNA, 20 bp, synthetic construct
  misc_feature 1..20: note = Synthetic construct
  source 1..20: mol_type = other DNA
acttgacgtacgcgccagtt

SEQ ID NO: 17962 - DNA, 20 bp, synthetic construct
  misc_feature 1..20: note = Synthetic construct
  source 1..20: mol_type = other DNA
actttccgtacgcgccagtt

SEQ ID NO: 17963 - DNA, 20 bp, synthetic construct
  misc_feature 1..20: note = Synthetic construct
  source 1..20: mol_type = other DNA
actttgcgtacgcgccagtt

SEQ ID NO: 17964 - DNA, 20 bp, synthetic construct
  misc_feature 1..20: note = Synthetic construct
  source 1..20: mol_type = other DNA
acttttcgtacgcgccagtt

SEQ ID NO: 17965 - DNA, 20 bp, synthetic construct
  misc_feature 1..20: note = Synthetic construct
  source 1..20: mol_type = other DNA
actttaagtacgcgccagtt

SEQ ID NO: 17966 - DNA, 20 bp, synthetic construct
  misc_feature 1..20: note = Synthetic construct
  source 1..20: mol_type = other DNA
actttaggtacgcgccagtt

SEQ ID NO: 17967 - DNA, 20 bp, synthetic construct
  misc_feature 1..20: note = Synthetic construct
  source 1..20: mol_type = other DNA
actttatgtacgcgccagtt

SEQ ID NO: 17968 - DNA, 20 bp, synthetic construct
  misc_feature 1..20: note = Synthetic construct
  source 1..20: mol_type = other DNA
actttacatacgcgccagtt

SEQ ID NO: 17969 - DNA, 20 bp, synthetic construct
  misc_feature 1..20: note = Synthetic construct
  source 1..20: mol_type = other DNA
actttacctacgcgccagtt

SEQ ID NO: 17970 - DNA, 20 bp, synthetic construct
  misc_feature 1..20: note = Synthetic construct
  source 1..20: mol_type = other DNA
actttacttacgcgccagtt

SEQ ID NO: 17971 - DNA, 20 bp, synthetic construct
  misc_feature 1..20: note = Synthetic construct
  source 1..20: mol_type = other DNA
actttacgaacgcgccagtt

SEQ ID NO: 17972 - DNA, 20 bp, synthetic construct
  misc_feature 1..20: note = Synthetic construct
  source 1..20: mol_type = other DNA
actttacgcacgcgccagtt

SEQ ID NO: 17973 - DNA, 20 bp, synthetic construct
  misc_feature 1..20: note = Synthetic construct
  source 1..20: mol_type = other DNA
actttacggacgcgccagtt

SEQ ID NO: 17974 - DNA, 20 bp, synthetic construct
  misc_feature 1..20: note = Synthetic construct
  source 1..20: mol_type = other DNA
actttacgtccgcgccagtt

SEQ ID NO: 17975 - DNA, 20 bp, synthetic construct
  misc_feature 1..20: note = Synthetic construct
  source 1..20: mol_type = other DNA
actttacgtgcgcgccagtt

SEQ ID NO: 17976 - DNA, 20 bp, synthetic construct
  misc_feature 1..20: note = Synthetic construct
  source 1..20: mol_type = other DNA
actttacgttcgcgccagtt

SEQ ID NO: 17977 - DNA, 20 bp, synthetic construct
  misc_feature 1..20: note = Synthetic construct
  source 1..20: mol_type = other DNA
actttacgtaagcgccagtt

SEQ ID NO: 17978 - DNA, 20 bp, synthetic construct
  misc_feature 1..20: note = Synthetic construct
  source 1..20: mol_type = other DNA
actttacgtaggcgccagtt

SEQ ID NO: 17979 - DNA, 20 bp, synthetic construct
  misc_feature 1..20: note = Synthetic construct
  source 1..20: mol_type = other DNA
actttacgtatgcgccagtt

SEQ ID NO: 17980 - DNA, 20 bp, synthetic construct
  misc_feature 1..20: note = Synthetic construct
  source 1..20: mol_type = other DNA
actttacgtacacgccagtt

SEQ ID NO: 17981 - DNA, 20 bp, synthetic construct
  misc_feature 1..20: note = Synthetic construct
  source 1..20: mol_type = other DNA
actttacgtacccgccagtt

SEQ ID NO: 17982 - DNA, 20 bp, synthetic construct
  misc_feature 1..20: note = Synthetic construct
  source 1..20: mol_type = other DNA
actttacgtactcgccagtt

SEQ ID NO: 17983 - DNA, 20 bp, synthetic construct
  misc_feature 1..20: note = Synthetic construct
  source 1..20: mol_type = other DNA
actttacgtacgagccagtt

SEQ ID NO: 17984 - DNA, 20 bp, synthetic construct
  misc_feature 1..20: note = Synthetic construct
  source 1..20: mol_type = other DNA
actttacgtacgggccagtt

SEQ ID NO: 17985 - DNA, 20 bp, synthetic construct
  misc_feature 1..20: note = Synthetic construct
  source 1..20: mol_type = other DNA
actttacgtacgtgccagtt

SEQ ID NO: 17986 - DNA, 20 bp, synthetic construct
  misc_feature 1..20: note = Synthetic construct
  source 1..20: mol_type = other DNA
actttacgtacgcaccagtt

SEQ ID NO: 17987 - DNA, 20 bp, synthetic construct
  misc_feature 1..20: note = Synthetic construct
  source 1..20: mol_type = other DNA
actttacgtacgccccagtt

SEQ ID NO: 17988 - DNA, 20 bp, synthetic construct
  misc_feature 1..20: note = Synthetic construct
  source 1..20: mol_type = other DNA
actttacgtacgctccagtt

SEQ ID NO: 17989 - DNA, 20 bp, synthetic construct
  misc_feature 1..20: note = Synthetic construct
  source 1..20: mol_type = other DNA
actttacgtacgcgacagtt

SEQ ID NO: 17990 - DNA, 20 bp, synthetic construct
  misc_feature 1..20: note = Synthetic construct
  source 1..20: mol_type = other DNA
actttacgtacgcggcagtt

SEQ ID NO: 17991 - DNA, 20 bp, synthetic construct
  misc_feature 1..20: note = Synthetic construct
  source 1..20: mol_type = other DNA
actttacgtacgcgtcagtt

SEQ ID NO: 17992 - DNA, 20 bp, synthetic construct
  misc_feature 1..20: note = Synthetic construct
  source 1..20: mol_type = other DNA
actttacgtacgcgcaagtt

SEQ ID NO: 17993 - DNA, 20 bp, synthetic construct
  misc_feature 1..20: note = Synthetic construct
  source 1..20: mol_type = other DNA
actttacgtacgcgcgagtt

SEQ ID NO: 17994 - DNA, 20 bp, synthetic construct
  misc_feature 1..20: note = Synthetic construct
  source 1..20: mol_type = other DNA
actttacgtacgcgctagtt

SEQ ID NO: 17995 - DNA, 20 bp, synthetic construct
  misc_feature 1..20: note = Synthetic construct
  source 1..20: mol_type = other DNA
actttacgtacgcgcccgtt

SEQ ID NO: 17996 - DNA, 20 bp, synthetic construct
  misc_feature 1..20: note = Synthetic construct
  source 1..20: mol_type = other DNA
actttacgtacgcgccggtt

SEQ ID NO: 17997 - DNA, 20 bp, synthetic construct
  misc_feature 1..20: note = Synthetic construct
  source 1..20: mol_type = other DNA
actttacgtacgcgcctgtt

SEQ ID NO: 17998 - DNA, 20 bp, synthetic construct
  misc_feature 1..20: note = Synthetic construct
  source 1..20: mol_type = other DNA
actttacgtacgcgccaatt

SEQ ID NO: 17999 - DNA, 20 bp, synthetic construct
  misc_feature 1..20: note = Synthetic construct
  source 1..20: mol_type = other DNA
actttacgtacgcgccactt

SEQ ID NO: 18000 - DNA, 20 bp, synthetic construct
  misc_feature 1..20: note = Synthetic construct
  source 1..20: mol_type = other DNA
actttacgtacgcgccattt

SEQ ID NO: 18001 - DNA, 20 bp, synthetic construct
  misc_feature 1..20: note = Synthetic construct
  source 1..20: mol_type = other DNA
actttacgtacgcgccagat

SEQ ID NO: 18002 - DNA, 20 bp, synthetic construct
  misc_feature 1..20: note = Synthetic construct
  source 1..20: mol_type = other DNA
actttacgtacgcgccagct

SEQ ID NO: 18003 - DNA, 20 bp, synthetic construct
  misc_feature 1..20: note = Synthetic construct
  source 1..20: mol_type = other DNA
actttacgtacgcgccaggt

SEQ ID NO: 18004 - DNA, 20 bp, synthetic construct
  misc_feature 1..20: note = Synthetic construct
  source 1..20: mol_type = other DNA
actttacgtacgcgccagta

SEQ ID NO: 18005 - DNA, 20 bp, synthetic construct
  misc_feature 1..20: note = Synthetic construct
  source 1..20: mol_type = other DNA
actttacgtacgcgccagtc

SEQ ID NO: 18006 - DNA, 20 bp, synthetic construct
  misc_feature 1..20: note = Synthetic construct
  source 1..20: mol_type = other DNA
actttacgtacgcgccagtg

SEQ ID NO: 18007 - DNA, 20 bp, synthetic construct
  misc_feature 1..20: note = Synthetic construct
  source 1..20: mol_type = other DNA
aaagagattgtcaacaggtt

SEQ ID NO: 18008 - DNA, 20 bp, synthetic construct
  misc_feature 1..20: note = Synthetic construct
  source 1..20: mol_type = other DNA
caagagattgtcaacaggtt

SEQ ID NO: 18009 - DNA, 20 bp, synthetic construct
  misc_feature 1..20: note = Synthetic construct
  source 1..20: mol_type = other DNA
taagagattgtcaacaggtt

SEQ ID NO: 18010 - DNA, 20 bp, synthetic construct
  misc_feature 1..20: note = Synthetic construct
  source 1..20: mol_type = other DNA
gcagagattgtcaacaggtt

SEQ ID NO: 18011 - DNA, 20 bp, synthetic construct
  misc_feature 1..20: note = Synthetic construct
  source 1..20: mol_type = other DNA
ggagagattgtcaacaggtt

SEQ ID NO: 18012 - DNA, 20 bp, synthetic construct
  misc_feature 1..20: note = Synthetic construct
  source 1..20: mol_type = other DNA
gtagagattgtcaacaggtt

SEQ ID NO: 18013 - DNA, 20 bp, synthetic construct
  misc_feature 1..20: note = Synthetic construct
  source 1..20: mol_type = other DNA
gacgagattgtcaacaggtt

SEQ ID NO: 18014 - DNA, 20 bp, synthetic construct
  misc_feature 1..20: note = Synthetic construct
  source 1..20: mol_type = other DNA
gaggagattgtcaacaggtt

SEQ ID NO: 18015 - DNA, 20 bp, synthetic construct
  misc_feature 1..20: note = Synthetic construct
  source 1..20: mol_type = other DNA
gatgagattgtcaacaggtt

SEQ ID NO: 18016 - DNA, 20 bp, synthetic construct
  misc_feature 1..20: note = Synthetic construct
  source 1..20: mol_type = other DNA
gaaaagattgtcaacaggtt

SEQ ID NO: 18017 - DNA, 20 bp, synthetic construct
  misc_feature 1..20: note = Synthetic construct
  source 1..20: mol_type = other DNA
gaacagattgtcaacaggtt

SEQ ID NO: 18018 - DNA, 20 bp, synthetic construct
  misc_feature 1..20: note = Synthetic construct
  source 1..20: mol_type = other DNA
gaatagattgtcaacaggtt

SEQ ID NO: 18019 - DNA, 20 bp, synthetic construct
  misc_feature 1..20: note = Synthetic construct
  source 1..20: mol_type = other DNA
gaagcgattgtcaacaggtt

SEQ ID NO: 18020 - DNA, 20 bp, synthetic construct
  misc_feature 1..20: note = Synthetic construct
  source 1..20: mol_type = other DNA
gaagggattgtcaacaggtt

SEQ ID NO: 18021 - DNA, 20 bp, synthetic construct
  misc_feature 1..20: note = Synthetic construct
  source 1..20: mol_type = other DNA
gaagtgattgtcaacaggtt

SEQ ID NO: 18022 - DNA, 20 bp, synthetic construct
  misc_feature 1..20: note = Synthetic construct
  source 1..20: mol_type = other DNA
gaagaaattgtcaacaggtt

SEQ ID NO: 18023 - DNA, 20 bp, synthetic construct
  misc_feature 1..20: note = Synthetic construct
  source 1..20: mol_type = other DNA
gaagacattgtcaacaggtt

SEQ ID NO: 18024 - DNA, 20 bp, synthetic construct
  misc_feature 1..20: note = Synthetic construct
  source 1..20: mol_type = other DNA
gaagatattgtcaacaggtt

SEQ ID NO: 18025 - DNA, 20 bp, synthetic construct
  misc_feature 1..20: note = Synthetic construct
  source 1..20: mol_type = other DNA
gaagagcttgtcaacaggtt

SEQ ID NO: 18026 - DNA, 20 bp, synthetic construct
  misc_feature 1..20: note = Synthetic construct
  source 1..20: mol_type = other DNA
gaagaggttgtcaacaggtt

SEQ ID NO: 18027 - DNA, 20 bp, synthetic construct
  misc_feature 1..20: note = Synthetic construct
  source 1..20: mol_type = other DNA
gaagagtttgtcaacaggtt

SEQ ID NO: 18028 - DNA, 20 bp, synthetic construct
  misc_feature 1..20: note = Synthetic construct
  source 1..20: mol_type = other DNA
gaagagaatgtcaacaggtt

SEQ ID NO: 18029 - DNA, 20 bp, synthetic construct
  misc_feature 1..20: note = Synthetic construct
  source 1..20: mol_type = other DNA
gaagagactgtcaacaggtt

SEQ ID NO: 18030 - DNA, 20 bp, synthetic construct
  misc_feature 1..20: note = Synthetic construct
  source 1..20: mol_type = other DNA
gaagagagtgtcaacaggtt

SEQ ID NO: 18031 - DNA, 20 bp, synthetic construct
  misc_feature 1..20: note = Synthetic construct
  source 1..20: mol_type = other DNA
gaagagatagtcaacaggtt

SEQ ID NO: 18032 - DNA, 20 bp, synthetic construct
  misc_feature 1..20: note = Synthetic construct
  source 1..20: mol_type = other DNA
gaagagatcgtcaacaggtt

SEQ ID NO: 18033 - DNA, 20 bp, synthetic construct
  misc_feature 1..20: note = Synthetic construct
  source 1..20: mol_type = other DNA
gaagagatggtcaacaggtt

SEQ ID NO: 18034 - DNA, 20 bp, synthetic construct
  misc_feature 1..20: note = Synthetic construct
  source 1..20: mol_type = other DNA
gaagagattatcaacaggtt

SEQ ID NO: 18035 - DNA, 20 bp, synthetic construct
  misc_feature 1..20: note = Synthetic construct
  source 1..20: mol_type = other DNA
gaagagattctcaacaggtt

SEQ ID NO: 18036 - DNA, 20 bp, synthetic construct
  misc_feature 1..20: note = Synthetic construct
  source 1..20: mol_type = other DNA
gaagagattttcaacaggtt

SEQ ID NO: 18037 - DNA, 20 bp, synthetic construct
  misc_feature 1..20: note = Synthetic construct
  source 1..20: mol_type = other DNA
gaagagattgacaacaggtt

SEQ ID NO: 18038 - DNA, 20 bp, synthetic construct
  misc_feature 1..20: note = Synthetic construct
  source 1..20: mol_type = other DNA
gaagagattgccaacaggtt

SEQ ID NO: 18039 - DNA, 20 bp, synthetic construct
  misc_feature 1..20: note = Synthetic construct
  source 1..20: mol_type = other DNA
gaagagattggcaacaggtt

SEQ ID NO: 18040 - DNA, 20 bp, synthetic construct
  misc_feature 1..20: note = Synthetic construct
  source 1..20: mol_type = other DNA
gaagagattgtaaacaggtt

SEQ ID NO: 18041 - DNA, 20 bp, synthetic construct
  misc_feature 1..20: note = Synthetic construct
  source 1..20: mol_type = other DNA
gaagagattgtgaacaggtt

SEQ ID NO: 18042 - DNA, 20 bp, synthetic construct
  misc_feature 1..20: note = Synthetic construct
  source 1..20: mol_type = other DNA
gaagagattgttaacaggtt

SEQ ID NO: 18043 - DNA, 20 bp, synthetic construct
  misc_feature 1..20: note = Synthetic construct
  source 1..20: mol_type = other DNA
gaagagattgtccacaggtt

SEQ ID NO: 18044 - DNA, 20 bp, synthetic construct
  misc_feature 1..20: note = Synthetic construct
  source 1..20: mol_type = other DNA
gaagagattgtcgacaggtt

SEQ ID NO: 18045 - DNA, 20 bp, synthetic construct
  misc_feature 1..20: note = Synthetic construct
  source 1..20: mol_type = other DNA
gaagagattgtctacaggtt

SEQ ID NO: 18046 - DNA, 20 bp, synthetic construct
  misc_feature 1..20: note = Synthetic construct
  source 1..20: mol_type = other DNA
gaagagattgtcaccaggtt

SEQ ID NO: 18047 - DNA, 20 bp, synthetic construct
  misc_feature 1..20: note = Synthetic construct
  source 1..20: mol_type = other DNA
gaagagattgtcagcaggtt

SEQ ID NO: 18048 - DNA, 20 bp, synthetic construct
  misc_feature 1..20: note = Synthetic construct
  source 1..20: mol_type = other DNA
gaagagattgtcatcaggtt

SEQ ID NO: 18049 - DNA, 20 bp, synthetic construct
  misc_feature 1..20: note = Synthetic construct
  source 1..20: mol_type = other DNA
gaagagattgtcaaaaggtt

SEQ ID NO: 18050 - DNA, 20 bp, synthetic construct
  misc_feature 1..20: note = Synthetic construct
  source 1..20: mol_type = other DNA
gaagagattgtcaagaggtt

SEQ ID NO: 18051 - DNA, 20 bp, synthetic construct
  misc_feature 1..20: note = Synthetic construct
  source 1..20: mol_type = other DNA
gaagagattgtcaataggtt

SEQ ID NO: 18052 - DNA, 20 bp, synthetic construct
  misc_feature 1..20: note = Synthetic construct
  source 1..20: mol_type = other DNA
gaagagattgtcaaccggtt

SEQ ID NO: 18053 - DNA, 20 bp, synthetic construct
  misc_feature 1..20: note = Synthetic construct
  source 1..20: mol_type = other DNA
gaagagattgtcaacgggtt

SEQ ID NO: 18054 - DNA, 20 bp, synthetic construct
  misc_feature 1..20: note = Synthetic construct
  source 1..20: mol_type = other DNA
gaagagattgtcaactggtt

SEQ ID NO: 18055 - DNA, 20 bp, synthetic construct
  misc_feature 1..20: note = Synthetic construct
  source 1..20: mol_type = other DNA
gaagagattgtcaacaagtt

SEQ ID NO: 18056 - DNA, 20 bp, synthetic construct
  misc_feature 1..20: note = Synthetic construct
  source 1..20: mol_type = other DNA
gaagagattgtcaacacgtt

SEQ ID NO: 18057 - DNA, 20 bp, synthetic construct
  misc_feature 1..20: note = Synthetic construct
  source 1..20: mol_type = other DNA
gaagagattgtcaacatgtt

SEQ ID NO: 18058 - DNA, 20 bp, synthetic construct
  misc_feature 1..20: note = Synthetic construct
  source 1..20: mol_type = other DNA
gaagagattgtcaacagatt

SEQ ID NO: 18059 - DNA, 20 bp, synthetic construct
  misc_feature 1..20: note = Synthetic construct
  source 1..20: mol_type = other DNA
gaagagattgtcaacagctt

SEQ ID NO: 18060 - DNA, 20 bp, synthetic construct
  misc_feature 1..20: note = Synthetic construct
  source 1..20: mol_type = other DNA
gaagagattgtcaacagttt

SEQ ID NO: 18061 - DNA, 20 bp, synthetic construct
  misc_feature 1..20: note = Synthetic construct
  source 1..20: mol_type = other DNA
gaagagattgtcaacaggat

SEQ ID NO: 18062 - DNA, 20 bp, synthetic construct
  misc_feature 1..20: note = Synthetic construct
  source 1..20: mol_type = other DNA
gaagagattgtcaacaggct

SEQ ID NO: 18063 - DNA, 20 bp, synthetic construct
  misc_feature 1..20: note = Synthetic construct
  source 1..20: mol_type = other DNA
gaagagattgtcaacagggt

SEQ ID NO: 18064 - DNA, 20 bp, synthetic construct
  misc_feature 1..20: note = Synthetic construct
  source 1..20: mol_type = other DNA
gaagagattgtcaacaggta

SEQ ID NO: 18065 - DNA, 20 bp, synthetic construct
  misc_feature 1..20: note = Synthetic construct
  source 1..20: mol_type = other DNA
gaagagattgtcaacaggtc

SEQ ID NO: 18066 - DNA, 20 bp, synthetic construct
  misc_feature 1..20: note = Synthetic construct
  source 1..20: mol_type = other DNA
gaagagattgtcaacaggtg

SEQ ID NO: 18067 - DNA, 23 bp, synthetic construct
  misc_feature 1..23: note = Synthetic construct
  source 1..23: mol_type = other DNA
aactcacccgttattacgtcagt

SEQ ID NO: 18068 - DNA, 23 bp, synthetic construct
  misc_feature 1..23: note = Synthetic construct
  source 1..23: mol_type = other DNA
cactcacccgttattacgtcagt

SEQ ID NO: 18069 - DNA, 23 bp, synthetic construct
  misc_feature 1..23: note = Synthetic construct
  source 1..23: mol_type = other DNA
tactcacccgttattacgtcagt

SEQ ID NO: 18070 - DNA, 23 bp, synthetic construct
  misc_feature 1..23: note = Synthetic construct
  source 1..23: mol_type = other DNA
gcctcacccgttattacgtcagt

SEQ ID NO: 18071 - DNA, 23 bp, synthetic construct
  misc_feature 1..23: note = Synthetic construct
  source 1..23: mol_type = other DNA
ggctcacccgttattacgtcagt

SEQ ID NO: 18072 - DNA, 23 bp, synthetic construct
  misc_feature 1..23: note = Synthetic construct
  source 1..23: mol_type = other DNA
gtctcacccgttattacgtcagt

SEQ ID NO: 18073 - DNA, 23 bp, synthetic construct
  misc_feature 1..23: note = Synthetic construct
  source 1..23: mol_type = other DNA
gaatcacccgttattacgtcagt

SEQ ID NO: 18074 - DNA, 23 bp, synthetic construct
  misc_feature 1..23: note = Synthetic construct
  source 1..23: mol_type = other DNA
gagtcacccgttattacgtcagt

SEQ ID NO: 18075 - DNA, 23 bp, synthetic construct
  misc_feature 1..23: note = Synthetic construct
  source 1..23: mol_type = other DNA
gattcacccgttattacgtcagt

SEQ ID NO: 18076 - DNA, 23 bp, synthetic construct
  misc_feature 1..23: note = Synthetic construct
  source 1..23: mol_type = other DNA
gacacacccgttattacgtcagt

SEQ ID NO: 18077 - DNA, 23 bp, synthetic construct
  misc_feature 1..23: note = Synthetic construct
  source 1..23: mol_type = other DNA
gacccacccgttattacgtcagt

SEQ ID NO: 18078 - DNA, 23 bp, synthetic construct
  misc_feature 1..23: note = Synthetic construct
  source 1..23: mol_type = other DNA
gacgcacccgttattacgtcagt

SEQ ID NO: 18079 - DNA, 23 bp, synthetic construct
  misc_feature 1..23: note = Synthetic construct
  source 1..23: mol_type = other DNA
gactaacccgttattacgtcagt

SEQ ID NO: 18080 - DNA, 23 bp, synthetic construct
  misc_feature 1..23: note = Synthetic construct
  source 1..23: mol_type = other DNA
gactgacccgttattacgtcagt

SEQ ID NO: 18081 - DNA, 23 bp, synthetic construct
  misc_feature 1..23: note = Synthetic construct
  source 1..23: mol_type = other DNA
gacttacccgttattacgtcagt

SEQ ID NO: 18082 - DNA, 23 bp, synthetic construct
  misc_feature 1..23: note = Synthetic construct
  source 1..23: mol_type = other DNA
gactcccccgttattacgtcagt

SEQ ID NO: 18083 - DNA, 23 bp, synthetic construct
  misc_feature 1..23: note = Synthetic construct
  source 1..23: mol_type = other DNA
gactcgcccgttattacgtcagt

SEQ ID NO: 18084 - DNA, 23 bp, synthetic construct
  misc_feature 1..23: note = Synthetic construct
  source 1..23: mol_type = other DNA
gactctcccgttattacgtcagt

SEQ ID NO: 18085 - DNA, 23 bp, synthetic construct
  misc_feature 1..23: note = Synthetic construct
  source 1..23: mol_type = other DNA
gactcaaccgttattacgtcagt

SEQ ID NO: 18086 - DNA, 23 bp, synthetic construct
  misc_feature 1..23: note = Synthetic construct
  source 1..23: mol_type = other DNA
gactcagccgttattacgtcagt

SEQ ID NO: 18087 - DNA, 23 bp, synthetic construct
  misc_feature 1..23: note = Synthetic construct
  source 1..23: mol_type = other DNA
gactcatccgttattacgtcagt

SEQ ID NO: 18088 - DNA, 23 bp, synthetic construct
  misc_feature 1..23: note = Synthetic construct
  source 1..23: mol_type = other DNA
gactcacacgttattacgtcagt

SEQ ID NO: 18089 - DNA, 23 bp, synthetic construct
  misc_feature 1..23: note = Synthetic construct
  source 1..23: mol_type = other DNA
gactcacgcgttattacgtcagt

SEQ ID NO: 18090 - DNA, 23 bp, synthetic construct
  misc_feature 1..23: note = Synthetic construct
  source 1..23: mol_type = other DNA
gactcactcgttattacgtcagt

SEQ ID NO: 18091 - DNA, 23 bp, synthetic construct
  misc_feature 1..23: note = Synthetic construct
  source 1..23: mol_type = other DNA
gactcaccagttattacgtcagt

SEQ ID NO: 18092 - DNA, 23 bp, synthetic construct
  misc_feature 1..23: note = Synthetic construct
  source 1..23: mol_type = other DNA
gactcaccggttattacgtcagt

SEQ ID NO: 18093 - DNA, 23 bp, synthetic construct
  misc_feature 1..23: note = Synthetic construct
  source 1..23: mol_type = other DNA
gactcacctgttattacgtcagt

SEQ ID NO: 18094 - DNA, 23 bp, synthetic construct
  misc_feature 1..23: note = Synthetic construct
  source 1..23: mol_type = other DNA
gactcacccattattacgtcagt

SEQ ID NO: 18095 - DNA, 23 bp, synthetic construct
  misc_feature 1..23: note = Synthetic construct
  source 1..23: mol_type = other DNA
gactcaccccttattacgtcagt

SEQ ID NO: 18096 - DNA, 23 bp, synthetic construct
  misc_feature 1..23: note = Synthetic construct
  source 1..23: mol_type = other DNA
gactcaccctttattacgtcagt

SEQ ID NO: 18097 - DNA, 23 bp, synthetic construct
  misc_feature 1..23: note = Synthetic construct
  source 1..23: mol_type = other DNA
gactcacccgatattacgtcagt

SEQ ID NO: 18098 - DNA, 23 bp, synthetic construct
  misc_feature 1..23: note = Synthetic construct
  source 1..23: mol_type = other DNA
gactcacccgctattacgtcagt

SEQ ID NO: 18099 - DNA, 23 bp, synthetic construct
  misc_feature 1..23: note = Synthetic construct
  source 1..23: mol_type = other DNA
gactcacccggtattacgtcagt

SEQ ID NO: 18100 - DNA, 23 bp, synthetic construct
  misc_feature 1..23: note = Synthetic construct
  source 1..23: mol_type = other DNA
gactcacccgtaattacgtcagt

SEQ ID NO: 18101 - DNA, 23 bp, synthetic construct
  misc_feature 1..23: note = Synthetic construct
  source 1..23: mol_type = other DNA
gactcacccgtcattacgtcagt

SEQ ID NO: 18102 - DNA, 23 bp, synthetic construct
  misc_feature 1..23: note = Synthetic construct
  source 1..23: mol_type = other DNA
gactcacccgtgattacgtcagt

SEQ ID NO: 18103 - DNA, 23 bp, synthetic construct
  misc_feature 1..23: note = Synthetic construct
  source 1..23: mol_type = other DNA
gactcacccgttcttacgtcagt

SEQ ID NO: 18104 - DNA, 23 bp, synthetic construct
  misc_feature 1..23: note = Synthetic construct
  source 1..23: mol_type = other DNA
gactcacccgttgttacgtcagt

SEQ ID NO: 18105 - DNA, 23 bp, synthetic construct
  misc_feature 1..23: note = Synthetic construct
  source 1..23: mol_type = other DNA
gactcacccgtttttacgtcagt

SEQ ID NO: 18106 - DNA, 23 bp, synthetic construct
  misc_feature 1..23: note = Synthetic construct
  source 1..23: mol_type = other DNA
gactcacccgttaatacgtcagt

SEQ ID NO: 18107 - DNA, 23 bp, synthetic construct
  misc_feature 1..23: note = Synthetic construct
  source 1..23: mol_type = other DNA
gactcacccgttactacgtcagt

SEQ ID NO: 18108 - DNA, 23 bp, synthetic construct
  misc_feature 1..23: note = Synthetic construct
  source 1..23: mol_type = other DNA
gactcacccgttagtacgtcagt

SEQ ID NO: 18109 - DNA, 23 bp, synthetic construct
  misc_feature 1..23: note = Synthetic construct
  source 1..23: mol_type = other DNA
gactcacccgttataacgtcagt

SEQ ID NO: 18110 - DNA, 23 bp, synthetic construct
  misc_feature 1..23: note = Synthetic construct
  source 1..23: mol_type = other DNA
gactcacccgttatcacgtcagt

SEQ ID NO: 18111 - DNA, 23 bp, synthetic construct
  misc_feature 1..23: note = Synthetic construct
  source 1..23: mol_type = other DNA
gactcacccgttatgacgtcagt

SEQ ID NO: 18112 - DNA, 23 bp, synthetic construct
  misc_feature 1..23: note = Synthetic construct
  source 1..23: mol_type = other DNA
gactcacccgttattccgtcagt

SEQ ID NO: 18113 - DNA, 23 bp, synthetic construct
  misc_feature 1..23: note = Synthetic construct
  source 1..23: mol_type = other DNA
gactcacccgttattgcgtcagt

SEQ ID NO: 18114 - DNA, 23 bp, synthetic construct
  misc_feature 1..23: note = Synthetic construct
  source 1..23: mol_type = other DNA
gactcacccgttatttcgtcagt

SEQ ID NO: 18115 - DNA, 23 bp, synthetic construct
  misc_feature 1..23: note = Synthetic construct
  source 1..23: mol_type = other DNA
gactcacccgttattaagtcagt

SEQ ID NO: 18116 - DNA, 23 bp, synthetic construct
  misc_feature 1..23: note = Synthetic construct
  source 1..23: mol_type = other DNA
gactcacccgttattaggtcagt

SEQ ID NO: 18117 - DNA, 23 bp, synthetic construct
  misc_feature 1..23: note = Synthetic construct
  source 1..23: mol_type = other DNA
gactcacccgttattatgtcagt

SEQ ID NO: 18118 - DNA, 23 bp, synthetic construct
  misc_feature 1..23: note = Synthetic construct
  source 1..23: mol_type = other DNA
gactcacccgttattacatcagt

SEQ ID NO: 18119 - DNA, 23 bp, synthetic construct
  misc_feature 1..23: note = Synthetic construct
  source 1..23: mol_type = other DNA
gactcacccgttattacctcagt

SEQ ID NO: 18120 - DNA, 23 bp, synthetic construct
  misc_feature 1..23: note = Synthetic construct
  source 1..23: mol_type = other DNA
gactcacccgttattacttcagt

SEQ ID NO: 18121 - DNA, 23 bp, synthetic construct
  misc_feature 1..23: note = Synthetic construct
  source 1..23: mol_type = other DNA
gactcacccgttattacgacagt

SEQ ID NO: 18122 - DNA, 23 bp, synthetic construct
  misc_feature 1..23: note = Synthetic construct
  source 1..23: mol_type = other DNA
gactcacccgttattacgccagt

SEQ ID NO: 18123 - DNA, 23 bp, synthetic construct
  misc_feature 1..23: note = Synthetic construct
  source 1..23: mol_type = other DNA
gactcacccgttattacggcagt

SEQ ID NO: 18124 - DNA, 23 bp, synthetic construct
  misc_feature 1..23: note = Synthetic construct
  source 1..23: mol_type = other DNA
gactcacccgttattacgtaagt

SEQ ID NO: 18125 - DNA, 23 bp, synthetic construct
  misc_feature 1..23: note = Synthetic construct
  source 1..23: mol_type = other DNA
gactcacccgttattacgtgagt

SEQ ID NO: 18126 - DNA, 23 bp, synthetic construct
  misc_feature 1..23: note = Synthetic construct
  source 1..23: mol_type = other DNA
gactcacccgttattacgttagt

SEQ ID NO: 18127 - DNA, 23 bp, synthetic construct
  misc_feature 1..23: note = Synthetic construct
  source 1..23: mol_type = other DNA
gactcacccgttattacgtccgt

SEQ ID NO: 18128 - DNA, 23 bp, synthetic construct
  misc_feature 1..23: note = Synthetic construct
  source 1..23: mol_type = other DNA
gactcacccgttattacgtcggt

SEQ ID NO: 18129 - DNA, 23 bp, synthetic construct
  misc_feature 1..23: note = Synthetic construct
  source 1..23: mol_type = other DNA
gactcacccgttattacgtctgt

SEQ ID NO: 18130 - DNA, 23 bp, synthetic construct
  misc_feature 1..23: note = Synthetic construct
  source 1..23: mol_type = other DNA
gactcacccgttattacgtcaat

SEQ ID NO: 18131 - DNA, 23 bp, synthetic construct
  misc_feature 1..23: note = Synthetic construct
  source 1..23: mol_type = other DNA
gactcacccgttattacgtcact

SEQ ID NO: 18132 - DNA, 23 bp, synthetic construct
  misc_feature 1..23: note = Synthetic construct
  source 1..23: mol_type = other DNA
gactcacccgttattacgtcatt

SEQ ID NO: 18133 - DNA, 23 bp, synthetic construct
  misc_feature 1..23: note = Synthetic construct
  source 1..23: mol_type = other DNA
gactcacccgttattacgtcaga

SEQ ID NO: 18134 - DNA, 23 bp, synthetic construct
  misc_feature 1..23: note = Synthetic construct
  source 1..23: mol_type = other DNA
gactcacccgttattacgtcagc

SEQ ID NO: 18135 - DNA, 23 bp, synthetic construct
  misc_feature 1..23: note = Synthetic construct
  source 1..23: mol_type = other DNA
gactcacccgttattacgtcagg

SEQ ID NO: 18136 - DNA, 21 bp, synthetic construct
  misc_feature 1..21: note = Synthetic construct
  source 1..21: mol_type = other DNA
aaggctccttacaggcagccc

SEQ ID NO: 18137 - DNA, 21 bp, synthetic construct
  misc_feature 1..21: note = Synthetic construct
  source 1..21: mol_type = other DNA
gaggctccttacaggcagccc

SEQ ID NO: 18138 - DNA, 21 bp, synthetic construct
  misc_feature 1..21: note = Synthetic construct
  source 1..21: mol_type = other DNA
taggctccttacaggcagccc

SEQ ID NO: 18139 - DNA, 21 bp, synthetic construct
  misc_feature 1..21: note = Synthetic construct
  source 1..21: mol_type = other DNA
ccggctccttacaggcagccc

SEQ ID NO: 18140 - DNA, 21 bp, synthetic construct
  misc_feature 1..21: note = Synthetic construct
  source 1..21: mol_type = other DNA
cgggctccttacaggcagccc

SEQ ID NO: 18141 - DNA, 21 bp, synthetic construct
  misc_feature 1..21: note = Synthetic construct
  source 1..21: mol_type = other DNA
ctggctccttacaggcagccc

SEQ ID NO: 18142 - DNA, 21 bp, synthetic construct
  misc_feature 1..21: note = Synthetic construct
  source 1..21: mol_type = other DNA
caagctccttacaggcagccc

SEQ ID NO: 18143 - DNA, 21 bp, synthetic construct
  misc_feature 1..21: note = Synthetic construct
  source 1..21: mol_type = other DNA
cacgctccttacaggcagccc

SEQ ID NO: 18144 - DNA, 21 bp, synthetic construct
  misc_feature 1..21: note = Synthetic construct
  source 1..21: mol_type = other DNA
catgctccttacaggcagccc

SEQ ID NO: 18145 - DNA, 21 bp, synthetic construct
  misc_feature 1..21: note = Synthetic construct
  source 1..21: mol_type = other DNA
cagactccttacaggcagccc

SEQ ID NO: 18146 - DNA, 21 bp, synthetic construct
  misc_feature 1..21: note = Synthetic construct
  source 1..21: mol_type = other DNA
cagcctccttacaggcagccc

SEQ ID NO: 18147 - DNA, 21 bp, synthetic construct
  misc_feature 1..21: note = Synthetic construct
  source 1..21: mol_type = other DNA
cagtctccttacaggcagccc

SEQ ID NO: 18148 - DNA, 21 bp, synthetic construct
  misc_feature 1..21: note = Synthetic construct
  source 1..21: mol_type = other DNA
caggatccttacaggcagccc

SEQ ID NO: 18149 - DNA, 21 bp, synthetic construct
  misc_feature 1..21: note = Synthetic construct
  source 1..21: mol_type = other DNA
cagggtccttacaggcagccc

SEQ ID NO: 18150 - DNA, 21 bp, synthetic construct
  misc_feature 1..21: note = Synthetic construct
  source 1..21: mol_type = other DNA
caggttccttacaggcagccc

SEQ ID NO: 18151 - DNA, 21 bp, synthetic construct
  misc_feature 1..21: note = Synthetic construct
  source 1..21: mol_type = other DNA
caggcaccttacaggcagccc

SEQ ID NO: 18152 - DNA, 21 bp, synthetic construct
  misc_feature 1..21: note = Synthetic construct
  source 1..21: mol_type = other DNA
caggccccttacaggcagccc

SEQ ID NO: 18153 - DNA, 21 bp, synthetic construct
  misc_feature 1..21: note = Synthetic construct
  source 1..21: mol_type = other DNA
caggcgccttacaggcagccc

SEQ ID NO: 18154 - DNA, 21 bp, synthetic construct
  misc_feature 1..21: note = Synthetic construct
  source 1..21: mol_type = other DNA
caggctacttacaggcagccc

SEQ ID NO: 18155 - DNA, 21 bp, synthetic construct
  misc_feature 1..21: note = Synthetic construct
  source 1..21: mol_type = other DNA
caggctgcttacaggcagccc

SEQ ID NO: 18156 - DNA, 21 bp, synthetic construct
  misc_feature 1..21: note = Synthetic construct
  source 1..21: mol_type = other DNA
caggcttcttacaggcagccc

SEQ ID NO: 18157 - DNA, 21 bp, synthetic construct
  misc_feature 1..21: note = Synthetic construct
  source 1..21: mol_type = other DNA
caggctcattacaggcagccc

SEQ ID NO: 18158 - DNA, 21 bp, synthetic construct
  misc_feature 1..21: note = Synthetic construct
  source 1..21: mol_type = other DNA
caggctcgttacaggcagccc

SEQ ID NO: 18159 - DNA, 21 bp, synthetic construct
  misc_feature 1..21: note = Synthetic construct
  source 1..21: mol_type = other DNA
caggctctttacaggcagccc

SEQ ID NO: 18160 - DNA, 21 bp, synthetic construct
  misc_feature 1..21: note = Synthetic construct
  source 1..21: mol_type = other DNA
caggctccatacaggcagccc

SEQ ID NO: 18161 - DNA, 21 bp, synthetic construct
  misc_feature 1..21: note = Synthetic construct
  source 1..21: mol_type = other DNA
caggctccctacaggcagccc

SEQ ID NO: 18162 - DNA, 21 bp, synthetic construct
  misc_feature 1..21: note = Synthetic construct
  source 1..21: mol_type = other DNA
caggctccgtacaggcagccc

SEQ ID NO: 18163 - DNA, 21 bp, synthetic construct
  misc_feature 1..21: note = Synthetic construct
  source 1..21: mol_type = other DNA
caggctcctaacaggcagccc

SEQ ID NO: 18164 - DNA, 21 bp, synthetic construct
  misc_feature 1..21: note = Synthetic construct
  source 1..21: mol_type = other DNA
caggctcctcacaggcagccc

SEQ ID NO: 18165 - DNA, 21 bp, synthetic construct
  misc_feature 1..21: note = Synthetic construct
  source 1..21: mol_type = other DNA
caggctcctgacaggcagccc

SEQ ID NO: 18166 - DNA, 21 bp, synthetic construct
  misc_feature 1..21: note = Synthetic construct
  source 1..21: mol_type = other DNA
caggctccttccaggcagccc

SEQ ID NO: 18167 - DNA, 21 bp, synthetic construct
  misc_feature 1..21: note = Synthetic construct
  source 1..21: mol_type = other DNA
caggctccttgcaggcagccc

SEQ ID NO: 18168 - DNA, 21 bp, synthetic construct
  misc_feature 1..21: note = Synthetic construct
  source 1..21: mol_type = other DNA
caggctcctttcaggcagccc

SEQ ID NO: 18169 - DNA, 21 bp, synthetic construct
  misc_feature 1..21: note = Synthetic construct
  source 1..21: mol_type = other DNA
caggctccttaaaggcagccc

SEQ ID NO: 18170 - DNA, 21 bp, synthetic construct
  misc_feature 1..21: note = Synthetic construct
  source 1..21: mol_type = other DNA
caggctccttagaggcagccc

SEQ ID NO: 18171 - DNA, 21 bp, synthetic construct
  misc_feature 1..21: note = Synthetic construct
  source 1..21: mol_type = other DNA
caggctccttataggcagccc

SEQ ID NO: 18172 - DNA, 21 bp, synthetic construct
  misc_feature 1..21: note = Synthetic construct
  source 1..21: mol_type = other DNA
caggctccttaccggcagccc

SEQ ID NO: 18173 - DNA, 21 bp, synthetic construct
  misc_feature 1..21: note = Synthetic construct
  source 1..21: mol_type = other DNA
caggctccttacgggcagccc

SEQ ID NO: 18174 - DNA, 21 bp, synthetic construct
  misc_feature 1..21: note = Synthetic construct
  source 1..21: mol_type = other DNA
caggctccttactggcagccc

SEQ ID NO: 18175 - DNA, 21 bp, synthetic construct
  misc_feature 1..21: note = Synthetic construct
  source 1..21: mol_type = other DNA
caggctccttacaagcagccc

SEQ ID NO: 18176 - DNA, 21 bp, synthetic construct
  misc_feature 1..21: note = Synthetic construct
  source 1..21: mol_type = other DNA
caggctccttacacgcagccc

SEQ ID NO: 18177 - DNA, 21 bp, synthetic construct
  misc_feature 1..21: note = Synthetic construct
  source 1..21: mol_type = other DNA
caggctccttacatgcagccc

SEQ ID NO: 18178 - DNA, 21 bp, synthetic construct
  misc_feature 1..21: note = Synthetic construct
  source 1..21: mol_type = other DNA
caggctccttacagacagccc

SEQ ID NO: 18179 - DNA, 21 bp, synthetic construct
  misc_feature 1..21: note = Synthetic construct
  source 1..21: mol_type = other DNA
caggctccttacagccagccc

SEQ ID NO: 18180 - DNA, 21 bp, synthetic construct
  misc_feature 1..21: note = Synthetic construct
  source 1..21: mol_type = other DNA
caggctccttacagtcagccc

SEQ ID NO: 18181 - DNA, 21 bp, synthetic construct
  misc_feature 1..21: note = Synthetic construct
  source 1..21: mol_type = other DNA
caggctccttacaggaagccc

SEQ ID NO: 18182 - DNA, 21 bp, synthetic construct
  misc_feature 1..21: note = Synthetic construct
  source 1..21: mol_type = other DNA
caggctccttacagggagccc

SEQ ID NO: 18183 - DNA, 21 bp, synthetic construct
  misc_feature 1..21: note = Synthetic construct
  source 1..21: mol_type = other DNA
caggctccttacaggtagccc

SEQ ID NO: 18184 - DNA, 21 bp, synthetic construct
  misc_feature 1..21: note = Synthetic construct
  source 1..21: mol_type = other DNA
caggctccttacaggccgccc

SEQ ID NO: 18185 - DNA, 21 bp, synthetic construct
  misc_feature 1..21: note = Synthetic construct
  source 1..21: mol_type = other DNA
caggctccttacaggcggccc

SEQ ID NO: 18186 - DNA, 21 bp, synthetic construct
  misc_feature 1..21: note = Synthetic construct
  source 1..21: mol_type = other DNA
caggctccttacaggctgccc

SEQ ID NO: 18187 - DNA, 21 bp, synthetic construct
  misc_feature 1..21: note = Synthetic construct
  source 1..21: mol_type = other DNA
caggctccttacaggcaaccc

SEQ ID NO: 18188 - DNA, 21 bp, synthetic construct
  misc_feature 1..21: note = Synthetic construct
  source 1..21: mol_type = other DNA
caggctccttacaggcacccc

SEQ ID NO: 18189 - DNA, 21 bp, synthetic construct
  misc_feature 1..21: note = Synthetic construct
  source 1..21: mol_type = other DNA
caggctccttacaggcatccc

SEQ ID NO: 18190 - DNA, 21 bp, synthetic construct
  misc_feature 1..21: note = Synthetic construct
  source 1..21: mol_type = other DNA
caggctccttacaggcagacc

SEQ ID NO: 18191 - DNA, 21 bp, synthetic construct
  misc_feature 1..21: note = Synthetic construct
  source 1..21: mol_type = other DNA
caggctccttacaggcaggcc

SEQ ID NO: 18192 - DNA, 21 bp, synthetic construct
  misc_feature 1..21: note = Synthetic construct
  source 1..21: mol_type = other DNA
caggctccttacaggcagtcc

SEQ ID NO: 18193 - DNA, 21 bp, synthetic construct
  misc_feature 1..21: note = Synthetic construct
  source 1..21: mol_type = other DNA
caggctccttacaggcagcac

SEQ ID NO: 18194 - DNA, 21 bp, synthetic construct
  misc_feature 1..21: note = Synthetic construct
  source 1..21: mol_type = other DNA
caggctccttacaggcagcgc

SEQ ID NO: 18195 - DNA, 21 bp, synthetic construct
  misc_feature 1..21: note = Synthetic construct
  source 1..21: mol_type = other DNA
caggctccttacaggcagctc

SEQ ID NO: 18196 - DNA, 21 bp, synthetic construct
  misc_feature 1..21: note = Synthetic construct
  source 1..21: mol_type = other DNA
caggctccttacaggcagcca

SEQ ID NO: 18197 - DNA, 21 bp, synthetic construct
  misc_feature 1..21: note = Synthetic construct
  source 1..21: mol_type = other DNA
caggctccttacaggcagccg

SEQ ID NO: 18198 - DNA, 21 bp, synthetic construct
  misc_feature 1..21: note = Synthetic construct
  source 1..21: mol_type = other DNA
caggctccttacaggcagcct

SEQ ID NO: 18199 - DNA, 21 bp, synthetic construct
  misc_feature 1..21: note = Synthetic construct
  source 1..21: mol_type = other DNA
atgagcaggaccccgaaaggg

SEQ ID NO: 18200 - DNA, 21 bp, synthetic construct
  misc_feature 1..21: note = Synthetic construct
  source 1..21: mol_type = other DNA
ctgagcaggaccccgaaaggg

SEQ ID NO: 18201 - DNA, 21 bp, synthetic construct
  misc_feature 1..21: note = Synthetic construct
  source 1..21: mol_type = other DNA
gtgagcaggaccccgaaaggg

SEQ ID NO: 18202 - DNA, 21 bp, synthetic construct
  misc_feature 1..21: note = Synthetic construct
  source 1..21: mol_type = other DNA
tagagcaggaccccgaaaggg

SEQ ID NO: 18203 - DNA, 21 bp, synthetic construct
  misc_feature 1..21: note = Synthetic construct
  source 1..21: mol_type = other DNA
tcgagcaggaccccgaaaggg

SEQ ID NO: 18204 - DNA, 21 bp, synthetic construct
  misc_feature 1..21: note = Synthetic construct
  source 1..21: mol_type = other DNA
tggagcaggaccccgaaaggg

SEQ ID NO: 18205 - DNA, 21 bp, synthetic construct
  misc_feature 1..21: note = Synthetic construct
  source 1..21: mol_type = other DNA
ttaagcaggaccccgaaaggg

SEQ ID NO: 18206 - DNA, 21 bp, synthetic construct
  misc_feature 1..21: note = Synthetic construct
  source 1..21: mol_type = other DNA
ttcagcaggaccccgaaaggg

SEQ ID NO: 18207 - DNA, 21 bp, synthetic construct
  misc_feature 1..21: note = Synthetic construct
  source 1..21: mol_type = other DNA
tttagcaggaccccgaaaggg

SEQ ID NO: 18208 - DNA, 21 bp, synthetic construct
  misc_feature 1..21: note = Synthetic construct
  source 1..21: mol_type = other DNA
ttgcgcaggaccccgaaaggg

SEQ ID NO: 18209 - DNA, 21 bp, synthetic construct
  misc_feature 1..21: note = Synthetic construct
  source 1..21: mol_type = other DNA
ttgggcaggaccccgaaaggg

SEQ ID NO: 18210 - DNA, 21 bp, synthetic construct
  misc_feature 1..21: note = Synthetic construct
  source 1..21: mol_type = other DNA
ttgtgcaggaccccgaaaggg

SEQ ID NO: 18211 - DNA, 21 bp, synthetic construct
  misc_feature 1..21: note = Synthetic construct
  source 1..21: mol_type = other DNA
ttgaacaggaccccgaaaggg

SEQ ID NO: 18212 - DNA, 21 bp, synthetic construct
  misc_feature 1..21: note = Synthetic construct
  source 1..21: mol_type = other DNA
ttgaccaggaccccgaaaggg

SEQ ID NO: 18213 - DNA, 21 bp, synthetic construct
  misc_feature 1..21: note = Synthetic construct
  source 1..21: mol_type = other DNA
ttgatcaggaccccgaaaggg

SEQ ID NO: 18214 - DNA, 21 bp, synthetic construct
  misc_feature 1..21: note = Synthetic construct
  source 1..21: mol_type = other DNA
ttgagaaggaccccgaaaggg

SEQ ID NO: 18215 - DNA, 21 bp, synthetic construct
  misc_feature 1..21: note = Synthetic construct
  source 1..21: mol_type = other DNA
ttgaggaggaccccgaaaggg

SEQ ID NO: 18216 - DNA, 21 bp, synthetic construct
  misc_feature 1..21: note = Synthetic construct
  source 1..21: mol_type = other DNA
ttgagtaggaccccgaaaggg

SEQ ID NO: 18217 - DNA, 21 bp, synthetic construct
  misc_feature 1..21: note = Synthetic construct
  source 1..21: mol_type = other DNA
ttgagccggaccccgaaaggg

SEQ ID NO: 18218 - DNA, 21 bp, synthetic construct
  misc_feature 1..21: note = Synthetic construct
  source 1..21: mol_type = other DNA
ttgagcgggaccccgaaaggg

SEQ ID NO: 18219 - DNA, 21 bp, synthetic construct
  misc_feature 1..21: note = Synthetic construct
  source 1..21: mol_type = other DNA
ttgagctggaccccgaaaggg

SEQ ID NO: 18220 - DNA, 21 bp, synthetic construct
  misc_feature 1..21: note = Synthetic construct
  source 1..21: mol_type = other DNA
ttgagcaagaccccgaaaggg

SEQ ID NO: 18221 - DNA, 21 bp, synthetic construct
  misc_feature 1..21: note = Synthetic construct
  source 1..21: mol_type = other DNA
ttgagcacgaccccgaaaggg

SEQ ID NO: 18222 - DNA, 21 bp, synthetic construct
  misc_feature 1..21: note = Synthetic construct
  source 1..21: mol_type = other DNA
ttgagcatgaccccgaaaggg

SEQ ID NO: 18223 - DNA, 21 bp, synthetic construct
  misc_feature 1..21: note = Synthetic construct
  source 1..21: mol_type = other DNA
ttgagcagaaccccgaaaggg

SEQ ID NO: 18224 - DNA, 21 bp, synthetic construct
  misc_feature 1..21: note = Synthetic construct
  source 1..21: mol_type = other DNA
ttgagcagcaccccgaaaggg

SEQ ID NO: 18225 - DNA, 21 bp, synthetic construct
  misc_feature 1..21: note = Synthetic construct
  source 1..21: mol_type = other DNA
ttgagcagtaccccgaaaggg

SEQ ID NO: 18226 - DNA, 21 bp, synthetic construct
  misc_feature 1..21: note = Synthetic construct
  source 1..21: mol_type = other DNA
ttgagcaggcccccgaaaggg

SEQ ID NO: 18227 - DNA, 21 bp, synthetic construct
  misc_feature 1..21: note = Synthetic construct
  source 1..21: mol_type = other DNA
ttgagcagggccccgaaaggg

SEQ ID NO: 18228 - DNA, 21 bp, synthetic construct
  misc_feature 1..21: note = Synthetic construct
  source 1..21: mol_type = other DNA
ttgagcaggtccccgaaaggg

SEQ ID NO: 18229 - DNA, 21 bp, synthetic construct
  misc_feature 1..21: note = Synthetic construct
  source 1..21: mol_type = other DNA
ttgagcaggaacccgaaaggg

SEQ ID NO: 18230 - DNA, 21 bp, synthetic construct
  misc_feature 1..21: note = Synthetic construct
  source 1..21: mol_type = other DNA
ttgagcaggagcccgaaaggg

SEQ ID NO: 18231 - DNA, 21 bp, synthetic construct
  misc_feature 1..21: note = Synthetic construct
  source 1..21: mol_type = other DNA
ttgagcaggatcccgaaaggg

SEQ ID NO: 18232 - DNA, 21 bp, synthetic construct
  misc_feature 1..21: note = Synthetic construct
  source 1..21: mol_type = other DNA
ttgagcaggacaccgaaaggg

SEQ ID NO: 18233 - DNA, 21 bp, synthetic construct
  misc_feature 1..21: note = Synthetic construct
  source 1..21: mol_type = other DNA
ttgagcaggacgccgaaaggg

SEQ ID NO: 18234 - DNA, 21 bp, synthetic construct
  misc_feature 1..21: note = Synthetic construct
  source 1..21: mol_type = other DNA
ttgagcaggactccgaaaggg

SEQ ID NO: 18235 - DNA, 21 bp, synthetic construct
  misc_feature 1..21: note = Synthetic construct
  source 1..21: mol_type = other DNA
ttgagcaggaccacgaaaggg

SEQ ID NO: 18236 - DNA, 21 bp, synthetic construct
  misc_feature 1..21: note = Synthetic construct
  source 1..21: mol_type = other DNA
ttgagcaggaccgcgaaaggg

SEQ ID NO: 18237 - DNA, 21 bp, synthetic construct
  misc_feature 1..21: note = Synthetic construct
  source 1..21: mol_type = other DNA
ttgagcaggacctcgaaaggg

SEQ ID NO: 18238 - DNA, 21 bp, synthetic construct
  misc_feature 1..21: note = Synthetic construct
  source 1..21: mol_type = other DNA
ttgagcaggacccagaaaggg

SEQ ID NO: 18239 - DNA, 21 bp, synthetic construct
  misc_feature 1..21: note = Synthetic construct
  source 1..21: mol_type = other DNA
ttgagcaggacccggaaaggg

SEQ ID NO: 18240 - DNA, 21 bp, synthetic construct
  misc_feature 1..21: note = Synthetic construct
  source 1..21: mol_type = other DNA
ttgagcaggaccctgaaaggg

SEQ ID NO: 18241 - DNA, 21 bp, synthetic construct
  misc_feature 1..21: note = Synthetic construct
  source 1..21: mol_type = other DNA
ttgagcaggaccccaaaaggg

SEQ ID NO: 18242 - DNA, 21 bp, synthetic construct
  misc_feature 1..21: note = Synthetic construct
  source 1..21: mol_type = other DNA
ttgagcaggacccccaaaggg

SEQ ID NO: 18243 - DNA, 21 bp, synthetic construct
  misc_feature 1..21: note = Synthetic construct
  source 1..21: mol_type = other DNA
ttgagcaggacccctaaaggg

SEQ ID NO: 18244 - DNA, 21 bp, synthetic construct
  misc_feature 1..21: note = Synthetic construct
  source 1..21: mol_type = other DNA
ttgagcaggaccccgcaaggg

SEQ ID NO: 18245 - DNA, 21 bp, synthetic construct
  misc_feature 1..21: note = Synthetic construct
  source 1..21: mol_type = other DNA
ttgagcaggaccccggaaggg

SEQ ID NO: 18246 - DNA, 21 bp, synthetic construct
  misc_feature 1..21: note = Synthetic construct
  source 1..21: mol_type = other DNA
ttgagcaggaccccgtaaggg

SEQ ID NO: 18247 - DNA, 21 bp, synthetic construct
  misc_feature 1..21: note = Synthetic construct
  source 1..21: mol_type = other DNA
ttgagcaggaccccgacaggg

SEQ ID NO: 18248 - DNA, 21 bp, synthetic construct
  misc_feature 1..21: note = Synthetic construct
  source 1..21: mol_type = other DNA
ttgagcaggaccccgagaggg

SEQ ID NO: 18249 - DNA, 21 bp, synthetic construct
  misc_feature 1..21: note = Synthetic construct
  source 1..21: mol_type = other DNA
ttgagcaggaccccgataggg

SEQ ID NO: 18250 - DNA, 21 bp, synthetic construct
  misc_feature 1..21: note = Synthetic construct
  source 1..21: mol_type = other DNA
ttgagcaggaccccgaacggg

SEQ ID NO: 18251 - DNA, 21 bp, synthetic construct
  misc_feature 1..21: note = Synthetic construct
  source 1..21: mol_type = other DNA
ttgagcaggaccccgaagggg

SEQ ID NO: 18252 - DNA, 21 bp, synthetic construct
  misc_feature 1..21: note = Synthetic construct
  source 1..21: mol_type = other DNA
ttgagcaggaccccgaatggg

SEQ ID NO: 18253 - DNA, 21 bp, synthetic construct
  misc_feature 1..21: note = Synthetic construct
  source 1..21: mol_type = other DNA
ttgagcaggaccccgaaaagg

SEQ ID NO: 18254 - DNA, 21 bp, synthetic construct
  misc_feature 1..21: note = Synthetic construct
  source 1..21: mol_type = other DNA
ttgagcaggaccccgaaacgg

SEQ ID NO: 18255 - DNA, 21 bp, synthetic construct
  misc_feature 1..21: note = Synthetic construct
  source 1..21: mol_type = other DNA
ttgagcaggaccccgaaatgg

SEQ ID NO: 18256 - DNA, 21 bp, synthetic construct
  misc_feature 1..21: note = Synthetic construct
  source 1..21: mol_type = other DNA
ttgagcaggaccccgaaagag

SEQ ID NO: 18257 - DNA, 21 bp, synthetic construct
  misc_feature 1..21: note = Synthetic construct
  source 1..21: mol_type = other DNA
ttgagcaggaccccgaaagcg

SEQ ID NO: 18258 - DNA, 21 bp, synthetic construct
  misc_feature 1..21: note = Synthetic construct
  source 1..21: mol_type = other DNA
ttgagcaggaccccgaaagtg

SEQ ID NO: 18259 - DNA, 21 bp, synthetic construct
  misc_feature 1..21: note = Synthetic construct
  source 1..21: mol_type = other DNA
ttgagcaggaccccgaaagga

SEQ ID NO: 18260 - DNA, 21 bp, synthetic construct
  misc_feature 1..21: note = Synthetic construct
  source 1..21: mol_type = other DNA
ttgagcaggaccccgaaaggc

SEQ ID NO: 18261 - DNA, 21 bp, synthetic construct
  misc_feature 1..21: note = Synthetic construct
  source 1..21: mol_type = other DNA
ttgagcaggaccccgaaaggt

SEQ ID NO: 18262 - DNA, 20 bp, synthetic construct
  misc_feature 1..20: note = Synthetic construct
  source 1..20: mol_type = other DNA
aagtatggaaccacgctatg

SEQ ID NO: 18263 - DNA, 20 bp, synthetic construct
  misc_feature 1..20: note = Synthetic construct
  source 1..20: mol_type = other DNA
gagtatggaaccacgctatg

SEQ ID NO: 18264 - DNA, 20 bp, synthetic construct
  misc_feature 1..20: note = Synthetic construct
  source 1..20: mol_type = other DNA
tagtatggaaccacgctatg

SEQ ID NO: 18265 - DNA, 20 bp, synthetic construct
  misc_feature 1..20: note = Synthetic construct
  source 1..20: mol_type = other DNA
ccgtatggaaccacgctatg

SEQ ID NO: 18266 - DNA, 20 bp, synthetic construct
  misc_feature 1..20: note = Synthetic construct
  source 1..20: mol_type = other DNA
cggtatggaaccacgctatg

SEQ ID NO: 18267 - DNA, 20 bp, synthetic construct
  misc_feature 1..20: note = Synthetic construct
  source 1..20: mol_type = other DNA
ctgtatggaaccacgctatg

SEQ ID NO: 18268 - DNA, 20 bp, synthetic construct
  misc_feature 1..20: note = Synthetic construct
  source 1..20: mol_type = other DNA
caatatggaaccacgctatg

SEQ ID NO: 18269 - DNA, 20 bp, synthetic construct
  misc_feature 1..20: note = Synthetic construct
  source 1..20: mol_type = other DNA
cactatggaaccacgctatg

SEQ ID NO: 18270 - DNA, 20 bp, synthetic construct
  misc_feature 1..20: note = Synthetic construct
  source 1..20: mol_type = other DNA
cattatggaaccacgctatg

SEQ ID NO: 18271 - DNA, 20 bp, synthetic construct
  misc_feature 1..20: note = Synthetic construct
  source 1..20: mol_type = other DNA
cagaatggaaccacgctatg

SEQ ID NO: 18272 - DNA, 20 bp, synthetic construct
  misc_feature 1..20: note = Synthetic construct
  source 1..20: mol_type = other DNA
cagcatggaaccacgctatg

SEQ ID NO: 18273 - DNA, 20 bp, synthetic construct
  misc_feature 1..20: note = Synthetic construct
  source 1..20: mol_type = other DNA
caggatggaaccacgctatg

SEQ ID NO: 18274 - DNA, 20 bp, synthetic construct
  misc_feature 1..20: note = Synthetic construct
  source 1..20: mol_type = other DNA
cagtctggaaccacgctatg

SEQ ID NO: 18275 - DNA, 20 bp, synthetic construct
  misc_feature 1..20: note = Synthetic construct
  source 1..20: mol_type = other DNA
cagtgtggaaccacgctatg

SEQ ID NO: 18276 - DNA, 20 bp, synthetic construct
  misc_feature 1..20: note = Synthetic construct
  source 1..20: mol_type = other DNA
cagtttggaaccacgctatg

SEQ ID NO: 18277 - DNA, 20 bp, synthetic construct
  misc_feature 1..20: note = Synthetic construct
  source 1..20: mol_type = other DNA
cagtaaggaaccacgctatg

SEQ ID NO: 18278 - DNA, 20 bp, synthetic construct
  misc_feature 1..20: note = Synthetic construct
  source 1..20: mol_type = other DNA
cagtacggaaccacgctatg

SEQ ID NO: 18279 - DNA, 20 bp, synthetic construct
  misc_feature 1..20: note = Synthetic construct
  source 1..20: mol_type = other DNA
cagtagggaaccacgctatg

SEQ ID NO: 18280 - DNA, 20 bp, synthetic construct
  misc_feature 1..20: note = Synthetic construct
  source 1..20: mol_type = other DNA
cagtatagaaccacgctatg

SEQ ID NO: 18281 - DNA, 20 bp, synthetic construct
  misc_feature 1..20: note = Synthetic construct
  source 1..20: mol_type = other DNA
cagtatcgaaccacgctatg

SEQ ID NO: 18282 - DNA, 20 bp, synthetic construct
  misc_feature 1..20: note = Synthetic construct
  source 1..20: mol_type = other DNA
cagtattgaaccacgctatg

SEQ ID NO: 18283 - DNA, 20 bp, synthetic construct
  misc_feature 1..20: note = Synthetic construct
  source 1..20: mol_type = other DNA
cagtatgaaaccacgctatg

SEQ ID NO: 18284 - DNA, 20 bp, synthetic construct
  misc_feature 1..20: note = Synthetic construct
  source 1..20: mol_type = other DNA
cagtatgcaaccacgctatg

SEQ ID NO: 18285 - DNA, 20 bp, synthetic construct
  misc_feature 1..20: note = Synthetic construct
  source 1..20: mol_type = other DNA
cagtatgtaaccacgctatg

SEQ ID NO: 18286 - DNA, 20 bp, synthetic construct
  misc_feature 1..20: note = Synthetic construct
  source 1..20: mol_type = other DNA
cagtatggcaccacgctatg

SEQ ID NO: 18287 - DNA, 20 bp, synthetic construct
  misc_feature 1..20: note = Synthetic construct
  source 1..20: mol_type = other DNA
cagtatgggaccacgctatg

SEQ ID NO: 18288 - DNA, 20 bp, synthetic construct
  misc_feature 1..20: note = Synthetic construct
  source 1..20: mol_type = other DNA
cagtatggtaccacgctatg

SEQ ID NO: 18289 - DNA, 20 bp, synthetic construct
  misc_feature 1..20: note = Synthetic construct
  source 1..20: mol_type = other DNA
cagtatggacccacgctatg

SEQ ID NO: 18290 - DNA, 20 bp, synthetic construct
  misc_feature 1..20: note = Synthetic construct
  source 1..20: mol_type = other DNA
cagtatggagccacgctatg

SEQ ID NO: 18291 - DNA, 20 bp, synthetic construct
  misc_feature 1..20: note = Synthetic construct
  source 1..20: mol_type = other DNA
cagtatggatccacgctatg

SEQ ID NO: 18292 - DNA, 20 bp, synthetic construct
  misc_feature 1..20: note = Synthetic construct
  source 1..20: mol_type = other DNA
cagtatggaaacacgctatg

SEQ ID NO: 18293 - DNA, 20 bp, synthetic construct
  misc_feature 1..20: note = Synthetic construct
  source 1..20: mol_type = other DNA
cagtatggaagcacgctatg

SEQ ID NO: 18294 - DNA, 20 bp, synthetic construct
  misc_feature 1..20: note = Synthetic construct
  source 1..20: mol_type = other DNA
cagtatggaatcacgctatg

SEQ ID NO: 18295 - DNA, 20 bp, synthetic construct
  misc_feature 1..20: note = Synthetic construct
  source 1..20: mol_type = other DNA
cagtatggaacaacgctatg

SEQ ID NO: 18296 - DNA, 20 bp, synthetic construct
  misc_feature 1..20: note = Synthetic construct
  source 1..20: mol_type = other DNA
cagtatggaacgacgctatg

SEQ ID NO: 18297 - DNA, 20 bp, synthetic construct
  misc_feature 1..20: note = Synthetic construct
  source 1..20: mol_type = other DNA
cagtatggaactacgctatg

SEQ ID NO: 18298 - DNA, 20 bp, synthetic construct
  misc_feature 1..20: note = Synthetic construct
  source 1..20: mol_type = other DNA
cagtatggaaccccgctatg

SEQ ID NO: 18299 - DNA, 20 bp, synthetic construct
  misc_feature 1..20: note = Synthetic construct
  source 1..20: mol_type = other DNA
cagtatggaaccgcgctatg

SEQ ID NO: 18300 - DNA, 20 bp, synthetic construct
  misc_feature 1..20: note = Synthetic construct
  source 1..20: mol_type = other DNA
cagtatggaacctcgctatg

SEQ ID NO: 18301 - DNA, 20 bp, synthetic construct
  misc_feature 1..20: note = Synthetic construct
  source 1..20: mol_type = other DNA
cagtatggaaccaagctatg

SEQ ID NO: 18302 - DNA, 20 bp, synthetic construct
  misc_feature 1..20: note = Synthetic construct
  source 1..20: mol_type = other DNA
cagtatggaaccaggctatg

SEQ ID NO: 18303 - DNA, 20 bp, synthetic construct
  misc_feature 1..20: note = Synthetic construct
  source 1..20: mol_type = other DNA
cagtatggaaccatgctatg

SEQ ID NO: 18304 - DNA, 20 bp, synthetic construct
  misc_feature 1..20: note = Synthetic construct
  source 1..20: mol_type = other DNA
cagtatggaaccacactatg

SEQ ID NO: 18305 - DNA, 20 bp, synthetic construct
  misc_feature 1..20: note = Synthetic construct
  source 1..20: mol_type = other DNA
cagtatggaaccaccctatg

SEQ ID NO: 18306 - DNA, 20 bp, synthetic construct
  misc_feature 1..20: note = Synthetic construct
  source 1..20: mol_type = other DNA
cagtatggaaccactctatg

SEQ ID NO: 18307 - DNA, 20 bp, synthetic construct
  misc_feature 1..20: note = Synthetic construct
  source 1..20: mol_type = other DNA
cagtatggaaccacgatatg

SEQ ID NO: 18308 - DNA, 20 bp, synthetic construct
  misc_feature 1..20: note = Synthetic construct
  source 1..20: mol_type = other DNA
cagtatggaaccacggtatg

SEQ ID NO: 18309 - DNA, 20 bp, synthetic construct
  misc_feature 1..20: note = Synthetic construct
  source 1..20: mol_type = other DNA
cagtatggaaccacgttatg

SEQ ID NO: 18310 - DNA, 20 bp, synthetic construct
  misc_feature 1..20: note = Synthetic construct
  source 1..20: mol_type = other DNA
cagtatggaaccacgcaatg

SEQ ID NO: 18311 - DNA, 20 bp, synthetic construct
  misc_feature 1..20: note = Synthetic construct
  source 1..20: mol_type = other DNA
cagtatggaaccacgccatg

SEQ ID NO: 18312 - DNA, 20 bp, synthetic construct
  misc_feature 1..20: note = Synthetic construct
  source 1..20: mol_type = other DNA
cagtatggaaccacgcgatg

SEQ ID NO: 18313 - DNA, 20 bp, synthetic construct
  misc_feature 1..20: note = Synthetic construct
  source 1..20: mol_type = other DNA
cagtatggaaccacgctctg

SEQ ID NO: 18314 - DNA, 20 bp, synthetic construct
  misc_feature 1..20: note = Synthetic construct
  source 1..20: mol_type = other DNA
cagtatggaaccacgctgtg

SEQ ID NO: 18315 - DNA, 20 bp, synthetic construct
  misc_feature 1..20: note = Synthetic construct
  source 1..20: mol_type = other DNA
cagtatggaaccacgctttg

SEQ ID NO: 18316 - DNA, 20 bp, synthetic construct
  misc_feature 1..20: note = Synthetic construct
  source 1..20: mol_type = other DNA
cagtatggaaccacgctaag

SEQ ID NO: 18317 - DNA, 20 bp, synthetic construct
  misc_feature 1..20: note = Synthetic construct
  source 1..20: mol_type = other DNA
cagtatggaaccacgctacg

SEQ ID NO: 18318 - DNA, 20 bp, synthetic construct
  misc_feature 1..20: note = Synthetic construct
  source 1..20: mol_type = other DNA
cagtatggaaccacgctagg

SEQ ID NO: 18319 - DNA, 20 bp, synthetic construct
  misc_feature 1..20: note = Synthetic construct
  source 1..20: mol_type = other DNA
cagtatggaaccacgctata

SEQ ID NO: 18320 - DNA, 20 bp, synthetic construct
  misc_feature 1..20: note = Synthetic construct
  source 1..20: mol_type = other DNA
cagtatggaaccacgctatc

SEQ ID NO: 18321 - DNA, 20 bp, synthetic construct
  misc_feature 1..20: note = Synthetic construct
  source 1..20: mol_type = other DNA
cagtatggaaccacgctatt

SEQ ID NO: 18322 - DNA, 21 bp, synthetic construct
  misc_feature 1..21: note = Synthetic construct
  source 1..21: mol_type = other DNA
aaagagattgtcaacaggttt

SEQ ID NO: 18323 - DNA, 21 bp, synthetic construct
  misc_feature 1..21: note = Synthetic construct
  source 1..21: mol_type = other DNA
caagagattgtcaacaggttt

SEQ ID NO: 18324 - DNA, 21 bp, synthetic construct
  misc_feature 1..21: note = Synthetic construct
  source 1..21: mol_type = other DNA
taagagattgtcaacaggttt

SEQ ID NO: 18325 - DNA, 21 bp, synthetic construct
  misc_feature 1..21: note = Synthetic construct
  source 1..21: mol_type = other DNA
gcagagattgtcaacaggttt

SEQ ID NO: 18326 - DNA, 21 bp, synthetic construct
  misc_feature 1..21: note = Synthetic construct
  source 1..21: mol_type = other DNA
ggagagattgtcaacaggttt

SEQ ID NO: 18327 - DNA, 21 bp, synthetic construct
  misc_feature 1..21: note = Synthetic construct
  source 1..21: mol_type = other DNA
gtagagattgtcaacaggttt

SEQ ID NO: 18328 - DNA, 21 bp, synthetic construct
  misc_feature 1..21: note = Synthetic construct
  source 1..21: mol_type = other DNA
gacgagattgtcaacaggttt

SEQ ID NO: 18329 - DNA, 21 bp, synthetic construct
  misc_feature 1..21: note = Synthetic construct
  source 1..21: mol_type = other DNA
gaggagattgtcaacaggttt

SEQ ID NO: 18330 - DNA, 21 bp, synthetic construct
  misc_feature 1..21: note = Synthetic construct
  source 1..21: mol_type = other DNA
gatgagattgtcaacaggttt

SEQ ID NO: 18331 - DNA, 21 bp, synthetic construct
  misc_feature 1..21: note = Synthetic construct
  source 1..21: mol_type = other DNA
gaaaagattgtcaacaggttt

SEQ ID NO: 18332 - DNA, 21 bp, synthetic construct
  misc_feature 1..21: note = Synthetic construct
  source 1..21: mol_type = other DNA
gaacagattgtcaacaggttt

SEQ ID NO: 18333 - DNA, 21 bp, synthetic construct
  misc_feature 1..21: note = Synthetic construct
  source 1..21: mol_type = other DNA
gaatagattgtcaacaggttt

SEQ ID NO: 18334 - DNA, 21 bp, synthetic construct
  misc_feature 1..21: note = Synthetic construct
  source 1..21: mol_type = other DNA
gaagcgattgtcaacaggttt

SEQ ID NO: 18335 - DNA, 21 bp, synthetic construct
  misc_feature 1..21: note = Synthetic construct
  source 1..21: mol_type = other DNA
gaagggattgtcaacaggttt

SEQ ID NO: 18336 - DNA, 21 bp, synthetic construct
  misc_feature 1..21: note = Synthetic construct
  source 1..21: mol_type = other DNA
gaagtgattgtcaacaggttt

SEQ ID NO: 18337 - DNA, 21 bp, synthetic construct
  misc_feature 1..21: note = Synthetic construct
  source 1..21: mol_type = other DNA
gaagaaattgtcaacaggttt

SEQ ID NO: 18338 - DNA, 21 bp, synthetic construct
  misc_feature 1..21: note = Synthetic construct
  source 1..21: mol_type = other DNA
gaagacattgtcaacaggttt

SEQ ID NO: 18339 - DNA, 21 bp, synthetic construct
  misc_feature 1..21: note = Synthetic construct
  source 1..21: mol_type = other DNA
gaagatattgtcaacaggttt

SEQ ID NO: 18340 - DNA, 21 bp, synthetic construct
  misc_feature 1..21: note = Synthetic construct
  source 1..21: mol_type = other DNA
gaagagcttgtcaacaggttt

SEQ ID NO: 18341 - DNA, 21 bp, synthetic construct
  misc_feature 1..21: note = Synthetic construct
  source 1..21: mol_type = other DNA
gaagaggttgtcaacaggttt

SEQ ID NO: 18342 - DNA, 21 bp, synthetic construct
  misc_feature 1..21: note = Synthetic construct
  source 1..21: mol_type = other DNA
gaagagtttgtcaacaggttt

SEQ ID NO: 18343 - DNA, 21 bp, synthetic construct
  misc_feature 1..21: note = Synthetic construct
  source 1..21: mol_type = other DNA
gaagagaatgtcaacaggttt

SEQ ID NO: 18344 - DNA, 21 bp, synthetic construct
  misc_feature 1..21: note = Synthetic construct
  source 1..21: mol_type = other DNA
gaagagactgtcaacaggttt

SEQ ID NO: 18345 - DNA, 21 bp, synthetic construct
  misc_feature 1..21: note = Synthetic construct
  source 1..21: mol_type = other DNA
gaagagagtgtcaacaggttt

SEQ ID NO: 18346 - DNA, 21 bp, synthetic construct
  misc_feature 1..21: note = Synthetic construct
  source 1..21: mol_type = other DNA
gaagagatagtcaacaggttt

SEQ ID NO: 18347 - DNA, 21 bp, synthetic construct
  misc_feature 1..21: note = Synthetic construct
  source 1..21: mol_type = other DNA
gaagagatcgtcaacaggttt

SEQ ID NO: 18348 - DNA, 21 bp, synthetic construct
  misc_feature 1..21: note = Synthetic construct
  source 1..21: mol_type = other DNA
gaagagatggtcaacaggttt

SEQ ID NO: 18349 - DNA, 21 bp, synthetic construct
  misc_feature 1..21: note = Synthetic construct
  source 1..21: mol_type = other DNA
gaagagattatcaacaggttt

SEQ ID NO: 18350 - DNA, 21 bp, synthetic construct
  misc_feature 1..21: note = Synthetic construct
  source 1..21: mol_type = other DNA
gaagagattctcaacaggttt

SEQ ID NO: 18351 - DNA, 21 bp, synthetic construct
  misc_feature 1..21: note = Synthetic construct
  source 1..21: mol_type = other DNA
gaagagattttcaacaggttt

SEQ ID NO: 18352 - DNA, 21 bp, synthetic construct
  misc_feature 1..21: note = Synthetic construct
  source 1..21: mol_type = other DNA
gaagagattgacaacaggttt

SEQ ID NO: 18353 - DNA, 21 bp, synthetic construct
  misc_feature 1..21: note = Synthetic construct
  source 1..21: mol_type = other DNA
gaagagattgccaacaggttt

SEQ ID NO: 18354 - DNA, 21 bp, synthetic construct
  misc_feature 1..21: note = Synthetic construct
  source 1..21: mol_type = other DNA
gaagagattggcaacaggttt

SEQ ID NO: 18355 - DNA, 21 bp, synthetic construct
  misc_feature 1..21: note = Synthetic construct
  source 1..21: mol_type = other DNA
gaagagattgtaaacaggttt

SEQ ID NO: 18356 - DNA, 21 bp, synthetic construct
  misc_feature 1..21: note = Synthetic construct
  source 1..21: mol_type = other DNA
gaagagattgtgaacaggttt

SEQ ID NO: 18357 - DNA, 21 bp, synthetic construct
  misc_feature 1..21: note = Synthetic construct
  source 1..21: mol_type = other DNA
gaagagattgttaacaggttt

SEQ ID NO: 18358 - DNA, 21 bp, synthetic construct
  misc_feature 1..21: note = Synthetic construct
  source 1..21: mol_type = other DNA
gaagagattgtccacaggttt

SEQ ID NO: 18359 - DNA, 21 bp, synthetic construct
  misc_feature 1..21: note = Synthetic construct
  source 1..21: mol_type = other DNA
gaagagattgtcgacaggttt

SEQ ID NO: 18360 - DNA, 21 bp, synthetic construct
  misc_feature 1..21: note = Synthetic construct
  source 1..21: mol_type = other DNA
gaagagattgtctacaggttt

SEQ ID NO: 18361 - DNA, 21 bp, synthetic construct
  misc_feature 1..21: note = Synthetic construct
  source 1..21: mol_type = other DNA
gaagagattgtcaccaggttt

SEQ ID NO: 18362 - DNA, 21 bp, synthetic construct
  misc_feature 1..21: note = Synthetic construct
  source 1..21: mol_type = other DNA
gaagagattgtcagcaggttt

SEQ ID NO: 18363 - DNA, 21 bp, synthetic construct
  misc_feature 1..21: note = Synthetic construct
  source 1..21: mol_type = other DNA
gaagagattgtcatcaggttt

SEQ ID NO: 18364 - DNA, 21 bp, synthetic construct
  misc_feature 1..21: note = Synthetic construct
  source 1..21: mol_type = other DNA
gaagagattgtcaaaaggttt

SEQ ID NO: 18365 - DNA, 21 bp, synthetic construct
  misc_feature 1..21: note = Synthetic construct
  source 1..21: mol_type = other DNA
gaagagattgtcaagaggttt

SEQ ID NO: 18366 - DNA, 21 bp, synthetic construct
  misc_feature 1..21: note = Synthetic construct
  source 1..21: mol_type = other DNA
gaagagattgtcaataggttt

SEQ ID NO: 18367 - DNA, 21 bp, synthetic construct
  misc_feature 1..21: note = Synthetic construct
  source 1..21: mol_type = other DNA
gaagagattgtcaaccggttt

SEQ ID NO: 18368 - DNA, 21 bp, synthetic construct
  misc_feature 1..21: note = Synthetic construct
  source 1..21: mol_type = other DNA
gaagagattgtcaacgggttt

SEQ ID NO: 18369 - DNA, 21 bp, synthetic construct
  misc_feature 1..21: note = Synthetic construct
  source 1..21: mol_type = other DNA
gaagagattgtcaactggttt

SEQ ID NO: 18370 - DNA, 21 bp, synthetic construct
  misc_feature 1..21: note = Synthetic construct
  source 1..21: mol_type = other DNA
gaagagattgtcaacaagttt

SEQ ID NO: 18371 - DNA, 21 bp, synthetic construct
  misc_feature 1..21: note = Synthetic construct
  source 1..21: mol_type = other DNA
gaagagattgtcaacacgttt

SEQ ID NO: 18372 - DNA, 21 bp, synthetic construct
  misc_feature 1..21: note = Synthetic construct
  source 1..21: mol_type = other DNA
gaagagattgtcaacatgttt

SEQ ID NO: 18373 - DNA, 21 bp, synthetic construct
  misc_feature 1..21: note = Synthetic construct
  source 1..21: mol_type = other DNA
gaagagattgtcaacagattt

SEQ ID NO: 18374 - DNA, 21 bp, synthetic construct
  misc_feature 1..21: note = Synthetic construct
  source 1..21: mol_type = other DNA
gaagagattgtcaacagcttt

SEQ ID NO: 18375 - DNA, 21 bp, synthetic construct
  misc_feature 1..21: note = Synthetic construct
  source 1..21: mol_type = other DNA
gaagagattgtcaacagtttt

SEQ ID NO: 18376 - DNA, 21 bp, synthetic construct
  misc_feature 1..21: note = Synthetic construct
  source 1..21: mol_type = other DNA
gaagagattgtcaacaggatt

SEQ ID NO: 18377 - DNA, 21 bp, synthetic construct
  misc_feature 1..21: note = Synthetic construct
  source 1..21: mol_type = other DNA
gaagagattgtcaacaggctt

SEQ ID NO: 18378 - DNA, 21 bp, synthetic construct
  misc_feature 1..21: note = Synthetic construct
  source 1..21: mol_type = other DNA
gaagagattgtcaacagggtt

SEQ ID NO: 18379 - DNA, 21 bp, synthetic construct
  misc_feature 1..21: note = Synthetic construct
  source 1..21: mol_type = other DNA
gaagagattgtcaacaggtat

SEQ ID NO: 18380 - DNA, 21 bp, synthetic construct
  misc_feature 1..21: note = Synthetic construct
  source 1..21: mol_type = other DNA
gaagagattgtcaacaggtct

SEQ ID NO: 18381 - DNA, 21 bp, synthetic construct
  misc_feature 1..21: note = Synthetic construct
  source 1..21: mol_type = other DNA
gaagagattgtcaacaggtgt

SEQ ID NO: 18382 - DNA, 21 bp, synthetic construct
  misc_feature 1..21: note = Synthetic construct
  source 1..21: mol_type = other DNA
gaagagattgtcaacaggtta

SEQ ID NO: 18383 - DNA, 21 bp, synthetic construct
  misc_feature 1..21: note = Synthetic construct
  source 1..21: mol_type = other DNA
gaagagattgtcaacaggttc

SEQ ID NO: 18384 - DNA, 21 bp, synthetic construct
  misc_feature 1..21: note = Synthetic construct
  source 1..21: mol_type = other DNA
gaagagattgtcaacaggttg

SEQ ID NO: 18385 - DNA, 21 bp, synthetic construct
  misc_feature 1..21: note = Synthetic construct
  source 1..21: mol_type = other DNA
aagccatggtagcgtctcgct

SEQ ID NO: 18386 - DNA, 21 bp, synthetic construct
  misc_feature 1..21: note = Synthetic construct
  source 1..21: mol_type = other DNA
cagccatggtagcgtctcgct

SEQ ID NO: 18387 - DNA, 21 bp, synthetic construct
  misc_feature 1..21: note = Synthetic construct
  source 1..21: mol_type = other DNA
gagccatggtagcgtctcgct

SEQ ID NO: 18388 - DNA, 21 bp, synthetic construct
  misc_feature 1..21: note = Synthetic construct
  source 1..21: mol_type = other DNA
tcgccatggtagcgtctcgct

SEQ ID NO: 18389 - DNA, 21 bp, synthetic construct
  misc_feature 1..21: note = Synthetic construct
  source 1..21: mol_type = other DNA
tggccatggtagcgtctcgct

SEQ ID NO: 18390 - DNA, 21 bp, synthetic construct
  misc_feature 1..21: note = Synthetic construct
  source 1..21: mol_type = other DNA
ttgccatggtagcgtctcgct

SEQ ID NO: 18391 - DNA, 21 bp, synthetic construct
  misc_feature 1..21: note = Synthetic construct
  source 1..21: mol_type = other DNA
taaccatggtagcgtctcgct

SEQ ID NO: 18392 - DNA, 21 bp, synthetic construct
  misc_feature 1..21: note = Synthetic construct
  source 1..21: mol_type = other DNA
tacccatggtagcgtctcgct

SEQ ID NO: 18393 - DNA, 21 bp, synthetic construct
  misc_feature 1..21: note = Synthetic construct
  source 1..21: mol_type = other DNA
tatccatggtagcgtctcgct

SEQ ID NO: 18394 - DNA, 21 bp, synthetic construct
  misc_feature 1..21: note = Synthetic construct
  source 1..21: mol_type = other DNA
tagacatggtagcgtctcgct

SEQ ID NO: 18395 - DNA, 21 bp, synthetic construct
  misc_feature 1..21: note = Synthetic construct
  source 1..21: mol_type = other DNA
taggcatggtagcgtctcgct

SEQ ID NO: 18396 - DNA, 21 bp, synthetic construct
  misc_feature 1..21: note = Synthetic construct
  source 1..21: mol_type = other DNA
tagtcatggtagcgtctcgct

SEQ ID NO: 18397 - DNA, 21 bp, synthetic construct
  misc_feature 1..21: note = Synthetic construct
  source 1..21: mol_type = other DNA
tagcaatggtagcgtctcgct

SEQ ID NO: 18398 - DNA, 21 bp, synthetic construct
  misc_feature 1..21: note = Synthetic construct
  source 1..21: mol_type = other DNA
tagcgatggtagcgtctcgct

SEQ ID NO: 18399 - DNA, 21 bp, synthetic construct
  misc_feature 1..21: note = Synthetic construct
  source 1..21: mol_type = other DNA
tagctatggtagcgtctcgct

SEQ ID NO: 18400 - DNA, 21 bp, synthetic construct
  misc_feature 1..21: note = Synthetic construct
  source 1..21: mol_type = other DNA
tagccctggtagcgtctcgct

SEQ ID NO: 18401 - DNA, 21 bp, synthetic construct
  misc_feature 1..21: note = Synthetic construct
  source 1..21: mol_type = other DNA
tagccgtggtagcgtctcgct

SEQ ID NO: 18402 - DNA, 21 bp, synthetic construct
  misc_feature 1..21: note = Synthetic construct
  source 1..21: mol_type = other DNA
tagccttggtagcgtctcgct

SEQ ID NO: 18403 - DNA, 21 bp, synthetic construct
  misc_feature 1..21: note = Synthetic construct
  source 1..21: mol_type = other DNA
tagccaaggtagcgtctcgct

SEQ ID NO: 18404 - DNA, 21 bp, synthetic construct
  misc_feature 1..21: note = Synthetic construct
  source 1..21: mol_type = other DNA
tagccacggtagcgtctcgct

SEQ ID NO: 18405 - DNA, 21 bp, synthetic construct
  misc_feature 1..21: note = Synthetic construct
  source 1..21: mol_type = other DNA
tagccagggtagcgtctcgct

SEQ ID NO: 18406 - DNA, 21 bp, synthetic construct
  misc_feature 1..21: note = Synthetic construct
  source 1..21: mol_type = other DNA
tagccatagtagcgtctcgct

SEQ ID NO: 18407 - DNA, 21 bp, synthetic construct
  misc_feature 1..21: note = Synthetic construct
  source 1..21: mol_type = other DNA
tagccatcgtagcgtctcgct

SEQ ID NO: 18408 - DNA, 21 bp, synthetic construct
  misc_feature 1..21: note = Synthetic construct
  source 1..21: mol_type = other DNA
tagccattgtagcgtctcgct

SEQ ID NO: 18409 - DNA, 21 bp, synthetic construct
  misc_feature 1..21: note = Synthetic construct
  source 1..21: mol_type = other DNA
tagccatgatagcgtctcgct

SEQ ID NO: 18410 - DNA, 21 bp, synthetic construct
  misc_feature 1..21: note = Synthetic construct
  source 1..21: mol_type = other DNA
tagccatgctagcgtctcgct

SEQ ID NO: 18411 - DNA, 21 bp, synthetic construct
  misc_feature 1..21: note = Synthetic construct
  source 1..21: mol_type = other DNA
tagccatgttagcgtctcgct

SEQ ID NO: 18412 - DNA, 21 bp, synthetic construct
  misc_feature 1..21: note = Synthetic construct
  source 1..21: mol_type = other DNA
tagccatggaagcgtctcgct

SEQ ID NO: 18413 - DNA, 21 bp, synthetic construct
  misc_feature 1..21: note = Synthetic construct
  source 1..21: mol_type = other DNA
tagccatggcagcgtctcgct

SEQ ID NO: 18414 - DNA, 21 bp, synthetic construct
  misc_feature 1..21: note = Synthetic construct
  source 1..21: mol_type = other DNA
tagccatgggagcgtctcgct

SEQ ID NO: 18415 - DNA, 21 bp, synthetic construct
  misc_feature 1..21: note = Synthetic construct
  source 1..21: mol_type = other DNA
tagccatggtcgcgtctcgct

SEQ ID NO: 18416 - DNA, 21 bp, synthetic construct
  misc_feature 1..21: note = Synthetic construct
  source 1..21: mol_type = other DNA
tagccatggtggcgtctcgct

SEQ ID NO: 18417 - DNA, 21 bp, synthetic construct
  misc_feature 1..21: note = Synthetic construct
  source 1..21: mol_type = other DNA
tagccatggttgcgtctcgct

SEQ ID NO: 18418 - DNA, 21 bp, synthetic construct
  misc_feature 1..21: note = Synthetic construct
  source 1..21: mol_type = other DNA
tagccatggtaacgtctcgct

SEQ ID NO: 18419 - DNA, 21 bp, synthetic construct
  misc_feature 1..21: note = Synthetic construct
  source 1..21: mol_type = other DNA
tagccatggtaccgtctcgct

SEQ ID NO: 18420 - DNA, 21 bp, synthetic construct
  misc_feature 1..21: note = Synthetic construct
  source 1..21: mol_type = other DNA
tagccatggtatcgtctcgct

SEQ ID NO: 18421 - DNA, 21 bp, synthetic construct
  misc_feature 1..21: note = Synthetic construct
  source 1..21: mol_type = other DNA
tagccatggtagagtctcgct

SEQ ID NO: 18422 - DNA, 21 bp, synthetic construct
  misc_feature 1..21: note = Synthetic construct
  source 1..21: mol_type = other DNA
tagccatggtagggtctcgct

SEQ ID NO: 18423 - DNA, 21 bp, synthetic construct
  misc_feature 1..21: note = Synthetic construct
  source 1..21: mol_type = other DNA
tagccatggtagtgtctcgct

SEQ ID NO: 18424 - DNA, 21 bp, synthetic construct
  misc_feature 1..21: note = Synthetic construct
  source 1..21: mol_type = other DNA
tagccatggtagcatctcgct

SEQ ID NO: 18425 - DNA, 21 bp, synthetic construct
  misc_feature 1..21: note = Synthetic construct
  source 1..21: mol_type = other DNA
tagccatggtagcctctcgct

SEQ ID NO: 18426 - DNA, 21 bp, synthetic construct
  misc_feature 1..21: note = Synthetic construct
  source 1..21: mol_type = other DNA
tagccatggtagcttctcgct

SEQ ID NO: 18427 - DNA, 21 bp, synthetic construct
  misc_feature 1..21: note = Synthetic construct
  source 1..21: mol_type = other DNA
tagccatggtagcgactcgct

SEQ ID NO: 18428 - DNA, 21 bp, synthetic construct
  misc_feature 1..21: note = Synthetic construct
  source 1..21: mol_type = other DNA
tagccatggtagcgcctcgct

SEQ ID NO: 18429 - DNA, 21 bp, synthetic construct
  misc_feature 1..21: note = Synthetic construct
  source 1..21: mol_type = other DNA
tagccatggtagcggctcgct

SEQ ID NO: 18430 - DNA, 21 bp, synthetic construct
  misc_feature 1..21: note = Synthetic construct
  source 1..21: mol_type = other DNA
tagccatggtagcgtatcgct

SEQ ID NO: 18431 - DNA, 21 bp, synthetic construct
  misc_feature 1..21: note = Synthetic construct
  source 1..21: mol_type = other DNA
tagccatggtagcgtgtcgct

SEQ ID NO: 18432 - DNA, 21 bp, synthetic construct
  misc_feature 1..21: note = Synthetic construct
  source 1..21: mol_type = other DNA
tagccatggtagcgtttcgct

SEQ ID NO: 18433 - DNA, 21 bp, synthetic construct
  misc_feature 1..21: note = Synthetic construct
  source 1..21: mol_type = other DNA
tagccatggtagcgtcacgct

SEQ ID NO: 18434 - DNA, 21 bp, synthetic construct
  misc_feature 1..21: note = Synthetic construct
  source 1..21: mol_type = other DNA
tagccatggtagcgtcccgct

SEQ ID NO: 18435 - DNA, 21 bp, synthetic construct
  misc_feature 1..21: note = Synthetic construct
  source 1..21: mol_type = other DNA
tagccatggtagcgtcgcgct

SEQ ID NO: 18436 - DNA, 21 bp, synthetic construct
  misc_feature 1..21: note = Synthetic construct
  source 1..21: mol_type = other DNA
tagccatggtagcgtctagct

SEQ ID NO: 18437 - DNA, 21 bp, synthetic construct
  misc_feature 1..21: note = Synthetic construct
  source 1..21: mol_type = other DNA
tagccatggtagcgtctggct

SEQ ID NO: 18438 - DNA, 21 bp, synthetic construct
  misc_feature 1..21: note = Synthetic construct
  source 1..21: mol_type = other DNA
tagccatggtagcgtcttgct

SEQ ID NO: 18439 - DNA, 21 bp, synthetic construct
  misc_feature 1..21: note = Synthetic construct
  source 1..21: mol_type = other DNA
tagccatggtagcgtctcact

SEQ ID NO: 18440 - DNA, 21 bp, synthetic construct
  misc_feature 1..21: note = Synthetic construct
  source 1..21: mol_type = other DNA
tagccatggtagcgtctccct

SEQ ID NO: 18441 - DNA, 21 bp, synthetic construct
  misc_feature 1..21: note = Synthetic construct
  source 1..21: mol_type = other DNA
tagccatggtagcgtctctct

SEQ ID NO: 18442 - DNA, 21 bp, synthetic construct
  misc_feature 1..21: note = Synthetic construct
  source 1..21: mol_type = other DNA
tagccatggtagcgtctcgat

SEQ ID NO: 18443 - DNA, 21 bp, synthetic construct
  misc_feature 1..21: note = Synthetic construct
  source 1..21: mol_type = other DNA
tagccatggtagcgtctcggt

SEQ ID NO: 18444 - DNA, 21 bp, synthetic construct
  misc_feature 1..21: note = Synthetic construct
  source 1..21: mol_type = other DNA
tagccatggtagcgtctcgtt

SEQ ID NO: 18445 - DNA, 21 bp, synthetic construct
  misc_feature 1..21: note = Synthetic construct
  source 1..21: mol_type = other DNA
tagccatggtagcgtctcgca

SEQ ID NO: 18446 - DNA, 21 bp, synthetic construct
  misc_feature 1..21: note = Synthetic construct
  source 1..21: mol_type = other DNA
tagccatggtagcgtctcgcc

SEQ ID NO: 18447 - DNA, 21 bp, synthetic construct
  misc_feature 1..21: note = Synthetic construct
  source 1..21: mol_type = other DNA
tagccatggtagcgtctcgcg
